United States Patent Application Publication US 2023/0117089 A1 - sequence listing, part 2

SEQ ID NO: 79 - DNA, 184486 bp, Homo sapiens
tcacgtgcatgcccagtcgggaggacgccctcagtgggagagccctgctcaggttctccccgaggccgaggtggtggtgggagcgggcggtggccccgggatcaaaggacctccgccgggttagctttggcagtgccgcagccaacccagcaggacgcttattttcaagcctggggaacgtagttcctcccgctttcacagcaggatggagcccgacggcaccccggttaaagggcctttccagagccctccggggaacggaaggccgcgctcctccgggagggagaacgacacactcttcgaggaaatcctggggcgggcgctctcctcgctgccgggacctttgtttctaagctggccacagctagagcagccttaagtgtcccaatgacacgcctgctatcgagcgccctcccggcggcccctcctcagccagctgcccagcgggcgtcctcaggtgtccccaagaggcgcaggcctagtcgcctacacgtcctttccaacttcgtcagctctggcttcccaccacccctcccggctctgcggcggcccagcctcttctccggttaattccggcctgtgcggcccggtcgtcccgtaaagaaggcaagcccgggttccgggtgaggggttggtgggtcagggtgggaaagcaaggcagcggtgagtcctctgctagcagatcgggctcaatatccccattccctgttttctccgggcccgccctccgcctctcaggcggccgccatgaagatcctctgccgcggctgcagccggtctgcaaacacacgcccacccgcacgcttagcctcgctcgccacagagggaggggtggaaaaggcactgagcatgctcggtggggagggcggggcgctcgtgggctgcgagtcggggccggagctcttcaggccggctcccgcgcctccgccgcccgcccgctcggagccgcgcccgccgcaggctgcgcccgccagtcccgccccgccccgccccgccccgccccccgccgctcgtccccgccgcggccgcgccgcctgcagcagcaccagctgctcctccccggcggccgccccccgcgggtccctccctggctgcgggagagacggaggtagagggaggacacagagccgcgccgcccgcaccacagaccttcgcctcgccccgccggttcctcaccctcggggagcaacatgggtaagtcatccttcctccgccgtcatcgcctgacatttttttctttctcggcgtgctgcagggtgggaagcatttctcgcgcaaagttgccggatttctccagtccccgggtgtgagacggtggctgttcctccggggagagtcggcgcacgcggaacgcacgccgggtgccggggctgggagggtcccgagcgcgggctggggtggggtcggccgcgggccggaccgccgcccggctccccggcacctcgcagcctcgcctcccctcctccattcttcctgccggtgcccgggcaccacggagcctgcctcgcgggctcgcatctgcagctccatccccgtttctccagaggccgcccgcttccttttcccccgcgtgtactgagctcgaggctcgggtccgaccactaccacttcgtgtaacttccttctctgtcagtgcgacctttccccgtcgtggagactcctcatcccgggcggggaagtggaagcaagtagtttgtgagggagatcttacaacctgcacggaaattattttccaagggggagagcggacagcctcataggttgaaaggatgacttgtcagaggccacgaggaacgtgaggcaggatagagccgctagctgttgaattagtgctgggtgactacagtgtgcaatattcccgtgcccagcctattttctggattccttcgtccgtcttctgtagcaggaaactgcgccctgtaacgttgttaccgaacttacatggtagttattctttcccagcttcctcctgtctaatctgcataatctgattttagttcctttgtatttatagttaatctgaagagattggtttggatgagagatttaagagcaaatatgttttataaaacgatatatacatttgacctaatttttttacatcatctattgcttaactgttacattcagtaatcacagaaacgtctgatgaatgctgtcatgtaattaagagctcaaagtttcttttaatagtagcgacttgtactaagttccccagtttgcttccactcctgtctgtcataatttcctctttttaaaatttgctcccttggcatctgtcagctgggacttttcccaccccttctgtgcgagttatttaaagcttgagatgaatgtggtcctttcatctgttaatacagtgctcaacacgttcagagttaggtggtgcaactcagaatcttcaagaagtatctaaacctgggaatggtgtccatagagttttctggaacagcaaatgcttcaggctttgatcccgacctttggccatatatctggaagaggccagggttgacggaggaggtggtatgaatcaaaaaaggtctagggctctgaattttattttcagttgttttttctttttaacgtgagtactcgatatgctgaacaaatttctgtaaaaattgggtggcccatttatgcgtgtctgcctttctcttaaagtagatttttaaataggtattatatcagattattggacaagctgtatatttccgtcgaacatacacacgtttatgtgtgttccctttgaacatacacagataaaatacactttgaaataaaattcctttgaacatacatacacagataagtgtgtgtatgttcaaaggaaatatacagtatgtccaataaccctatctgatattggactgtaagttcaagtttggcttgcaaaatatattttcccatgtttccaggtgagccttaaacaatccatttaacattttagcttacatgttaaatccgtactttttcagtggaaaaaatccaattccgttacaacactggtgaataaaaatacctaaaagaaattatctacttaaaaataatcttcaaaatcttgagtgctattgcttgatttttaaaaagggccaaatagaaacctatctctcattttgaagccatctctgatactctttggttaatctgtctcttcataagcactgtttgtaccttgttagaagctttttagcacttacgtaatctaccatataataaagttgtttatgtgtgtgctgtgcatttaatcatgagtcccagaagatgaaaagtgtcttattattttttgtgttccccacagtgcttttcaaatagaaattcagtaaatctttggcaaattgttgaacttaaagccacctattattttcaacttttgaacctgaagatatagtcttcatctgaacaaacatttgggttggtacatattatctagttgggggataagcagaaacagaaaggtataattgtaccatgcctcccagtacactgtaggttggttttgagtcaacctcaggcaatctgtttccttctaaactctcttcaatggtaaggcagtttcatgtatgatcagtaggtacatatgataatttaaaattgaaaccttggggaacagttttatatctgggccaaggaagttagtataacaattcatgtacacataagaaggtagaaggtatactggttaatgatgaggggagggagaagtgctttttaatttgtctcaagaaataaataaggttgatttttaaagatagtctcagccgggcgcgcactttgggaggccgaggcgggcggatcacctgaggtcaggagttggagaccagcctgactaacatggtaaaaccctgtctctactaaaaatacaaaaaaacaattagccgggtgtggtggcgggcgcctgtaatcccagctgtttgggaggctgaggcaggagaatcacttgaacccgggaggcggagtttgcagtgagccgagatcatgccattgcactccagcctgggcaacaagagggaaactctgtctcaaaaaaaatatatatatatattctcatggcaataatttcctacacaagagagtgaaagaaaagtcctatataactttatggccatagctactattttatgtatatgtcatatttcagattcaacatacatttagtgtttgttggatatcaactgtgcagtgtactgtactacagtgtactgggaggacaaagataaaaagatattcatgtttcacatttataatcttagcaggaacaatatgacacatacacaaattataatagaagtaaaagtataagttatataaaagacctttacatatattatagattcagagaatggagagaacgttttagagaaatggtgttatttgaaccaaaggtgggttaaacttcttaaaggtagaaatgagactgttaatcagaatggagttggtctggggttggaagagaaatgacataaatgaagatagataggaaacattttatgaatttccaggatatgattaaacagcattgtttggctagagcaaaaggtaaggaaatagtgggtaacagacatgaaaaagtagtacagtaatagctaatgaccagataatgtaggatctaaaatgccaagctgaagaattttaatctgacttacctattgagagaccactaaacatttttatgtagttaagtgatggatcacatctgtggtataggaaaatttgtcagttgagtgcaggatcgattagatgagaaactacagaacacttcagaagattgttgttggagtttggacgaaaatgtttaatggcttgaaccaggttatggcaacgggaatagaatattgcaaataaagaataggatttacttggcaacccattgagtatggaattgagagtcacaggttttagcctgggtgataatgaggatacgagaatctcctgatacatattcagttaacaggaagaggaaacttagatactcaattttggacctattgcattagactttttggtctgtcctttagtctctgctccttgataacaaggacgttgtcatattaggatttgaatacatttctaacactagtgtctggcacatagtagctacatagaaaaattgtgttgactgactgaaactagataaaaaatagttgacaaacatttattttaactttcgagagtacaatttgaattagagatctggaagttatccacaaatatcctgaggtgatatttgaagttagatcagaggacaagagtcaacaaagaaaaagaggaaaattgttcatggtaagaatcttgaggaatggggttccttaagttttccgtagttagggaaaaaggaatggtatgatttcacactgaaaaacacagaagtcagagtgaaagactagaattggtatatggttggttttaagaaagagtgaatagttaataaggtctgttttttcagaacagtcaggagggtgatagggactgagaacaggctctaagtgctttggttaggatattacccagtatatttttctaaaaagccactttaagaggtttagtagatatggaggtcagttgtaaaggctaagtgaataataagtggaaacagttcactaggtatagtcatgctgtatttctcaccttgtttaaagatctgtgagaaaacatagatttttaaaaatatttttaactcactctgcatgacagatattacattttagaaaatattttaaaattttaaatgtattttaatttacaaattaaaaaaattattttaatgttacattttacatggaaggacatgtgctgttttcatgtctaaggataatttttaatttcaccatagtgcctcacatttctctgacatttcatttttaatgtctttgtgacttagtatagtacaatttttatttttataatgtctgtcatgcagagtgagtctagaatgattttataattttgcatggcattttgcctaaacaatactctttactgatgaatggttttatcacttttactcttagactttgtgaatttgagacttctttagattataggtatgcttctaattatatttttaattcctggagttgtagttttctctgtagataggtatcaaacttatagtcattttattttgcctgtatttccaagtccaggaatggttttcatagctaaataataaatactaattttgcctgatctttgcaagtctaggcagggtgataaaatatttttgaaagctggtaattactaaaatttatgatttcaaaaaagcatagatgctagcttggtaaatttaaaaatttttcttatgttggcattatatctgttttgtatatgtcttttttcatatgggagaaaggttgaattcactatccttggtagtcatattctgaagtctgtactactactatttgaaaaattataatagccttaactctttttaagaaccaaaatgattttgctttcatagtggaatcttggaatttctaggtgactttggggaaatagtgtggatgctctccagaaattcctgattgaacctgagattgaacatagcaattctggagttattggtggcactaacaacagccatcagaattacctaaattttaatatccagtcatgaacatcaggaggaatgaaggaggaagattcagtcctttgggaacctgatgtaattttagatagccaaatgtttggataactgataaggaaaaagtttaatttaaaatacatgttgatgttgagttcagtttgccagtattttgttgaggatttttctatttatgtttattaaggatattagcttgtagtttcttttcttgtagtatcattgtctggctttggtatcagggtaatgctggcctcattaaatgagtttggaagtatttcccttcattgtttggaaagagtttgaggaggattggtattagttccttttttaaaataatttcaacttttagtttaggttcagagggtacatgtgcatgttttttacatgggcatgttatgtgacactttggagtatgaataatcccatcacccaggggtttggagtatgaataatcccatcacccaggtagtgtgcatggtacccagtgggtagtttttcagcccttgcctccctccatttgtccccctctagtagtccccagtatctgttgttcccatctttatgtccatatgtacacccagtgcttagcttccgcttataaatgagaacatgtggtatttggatttcttgtttctatgttaatttgcttaggatagtggcctccagctccatccatgttgctgcaaaggacatgatttcattcttttttgtgggtgcatagtattccatggtatatatgtgtcacattttctttatccaatccactattgataggcacctgggttgttttcatgtctttgttattgtgaatagtgctgcgatgaagatccaagagcatgtgcctttttggtagcatgatttatttttctctggaaatatacccagtaatgggatggctgggtcaaatggtagttctgttttaagttcgtcgagaagtctccaaattgcgttccacagtgtctgaactaatttatatttccactaacagtgtaaaaacattctcttttctccacagccttacagcatctgttttttgtttgtttgtttttactttttaataatagccattctgactggtgtgaaatggtgtctcattgtggtttgatttgcagtctcatcacattaagaggatcatacgtcatgatcaagtgggatttatccctgggatgcaagaatggttgaacatacacaaatcaataaatgtgatacaccacgttaacagaatgaagaacaaaaatcatacgatcatctcagttgatgcagaaaaagcatttgacaaaattcaacatactttcatttttaaaactctcaacaaatttggtgtagaatgaatatgcctaaacatagtaaaggtcctatatgacaagcccatagctaacatcatacttaatggtgaaaatctgaaaagtttatctcagattgagaaaaaaaacaaggatgcccactcttgccactgctatttaagatagtactagaagtcctagcagagcaaatagacaagaaaaagaaattaaaaagcattcaaattggagagtaaaatgatctgtttaaagatagcatggtcttatacatagaaagccttaaagactccttgaaaaaaaagacaaaaactattagtcctaataaatgaattcagtaaagtttcaggatacaaaatcagcatagaaaaatcagaagcatttctatacactaacagcaaactttctgaggatgtaatcaagaaaacaatcctatttacagtagctgcaaaaatataaaatatttaggaatagatttaaccaagaaggtgaaagatctctatgctgaaaactgtaagacattgatgaaagaatttgaaaaattaacagatatcccatattcataaattggaagaattaatattgttacaatgttcatagtactgaaagtgatctacagattcaatgtaatccctatcaaaattccagtgaaacttttcacagaaatagcaaaacaattctaaaatttgtatggaaccacaaaagatctgaatagccagaataatcttgagcaagaagaacaaggccaggggcatcacactacatgcttcaagtcatgttacaaagctgtagtgatcaaaacagtatggtactggcataaaagcagacacatagatcaatggaacagaatagagaggccagaaataaacccaagaatttacagtcaattgatcttcaaaaaaaaaaaaaaaaaaaaaagccaaggaaacacaatggggacaggacaatctcttcaataaacactgttgttaaaactagatacccacatactgaagaatgacattggatccttattcatcccatatacaaaaatcagctcaaaatgggtcagagatttaaacaaaagatttgaatttgaaaagcataagatgcgcgcaagaaaatactggagagaagctccataagattggtgttggcaatgattttttgtttatggcaccaaaagcacaggcaacaaaagcaaaaataaacaaatgggacttcatcaaattaataagtttctctgtagcaaaggaaacaacaaaatgaaaaggcagcttacataatgaggggaaatatttgcaagccgtatatccgattaggggttaacacgtaaaaataatcaggaactcatacaactcagtagctaaaataaaataaaaatacaggttgaggatccctaattcaaaatctgaaatgcttcaaaatctgaaactttttgaatgctgacatgacactcaaaggaaatgcacattgcagcatttggatttttggtttcagatttttggattagggatgttaaaccagttagtatcatgcatgtattccaaaatctgaataatttcaaaatctgaaacacttctggtctaaagcattttgcataagggatactcaatctgtatttacctagatgtaaataataaatgaatatattagaataggttattgtctcagtccattttgtgctgctatgacagaatactgcagactgggtaatatataaagaacagaaatttattctatcagagttctggagtctggtaactacaagatcaaagtgcctgcaggtttggtctttggtttcaagatgaggcctagttgctgtgtcctccaaagaggagaaaccttgtgccctcacacaacagaaaagcaaaagagaaaatccactctggtaagctctttttataatgccattaatctatttatgagggcagagccatcataacctaaacacctcccattaccttccagtactgttgtgtttaagtttcaacatgagttttggaggggacaaaaacattcaaaccatatagttataaagactatttcagttataaaagcctgtgattccttgaaactgaagtttgaaatatactccatatcattggtatcttaaatataacctctatataacttgtttttctttagtgttcaaatggtaatgtatacttgaggtagcaacttaagggtttgaaccaactttagctttgtctgaataaatgacctaaaaaaacatttctcaagctggctaagatatggatgctggattcaaattgcaggtgaaataattctctcagtgcttctatttatatagcttttgtaactagaagcatttcaggagttaaaaccaaggactaggttagtgataaatggaagtggttaaattgagctcttagctatgattggctgtacagttgaccgttgaataacatggatttgaacagcgcagttccacttccatgtggatttttttttttcaataaaagctataccaagtgagttgcctctcctgcctccccttttacctcctccacctctgccacacctgagacagctagatgaacccctcctcttctcagcctactcaagagtgactataataaggatgaagacctttatgatgacccacttcccatgtaatgaacagtaaatacattttctcttccttccattttcttttctctagcttaccttattgtaacaatatggtatttgatgcatatggtatatgatgcatataacatacataatatgtgttaattgactgtttatgttattggtaaggcttctggtcagcattaggctattaaggttttagggagttaaaagttatgtgtggatttttgactgagtgagagggggattggtacccctagtgcctgcattgttcaagggtcaacagtacttgttaattccaaagtcctttttgttcacaaaatgactttaggtacttattggtactgaaatatatttattaatatctgggctacatctttgtatttagcagattagtagacatctctactaattaaactcattgagttcaaaataaaactcattttataatttttaataatgataattagaggggtgctggtaaatgtttaactaaacgcctttctccaaaatagccctgatttgtgatggctgtcaatttcctgtggtgtaaatactccccccatggctcatttcaagccgctaaaatagtgtcactgaatgcagagttgagaagagataagaggtagcacatcattatataccatatccaccatacagacataatctcattagcacatataatagtaaaatgtaaagtaagtagtgatggttttgagtgttaattcttctgttttagtataactcatttatgtatatataattatgttttaataactgcctcataaaaatcctgaaaatttaataattatatctcatggggtagtatagggggctgtataccattgagttcataattaccatttattaagaatgattgatgtgagttatgctacactttacatatttttaaaactgaattttaatcctttcaacaattctatgaagtaggtgacactgtctccattttactaaatcaaagaattaaataatttatccaaggggacaactaacactccaacatcctgatttagagcaatggttttcaaacttcagcttgcatagaatcacttgaagagcttgtttttaaaaaatactgggcccaccttcagaagttctggttcaatagatgtggggtgggctgagaatttgcattgtcaagaccttcccaggtgatgccacactgggaacagcaccaccatcaagcataggctgacaagctttttccataaaggaccagatgataaatatttcaggctttgtaggccatgaggcggaatcaaagatactacatattgggttagtgtgtaagtaattgtggtttcagactctgcattttaaataattattactaggcgcaaacacatctttattaatcaaaataggaacattaaaatcaacacatttttgccaatgggaagtaagtttattcctgtagcattaaaatccatgcttcgggatttatcaaacacttggaaagcattttctgcatcctgctggttgtggaagcattttccctcctaaaagttgtcgagatgcttgaagaagtggtagtcagttggtgagaggtcaagtgaatatggcaggtgaggcaaaacttcatagctcggttcgttcaacttttgaagcgttggttgtgcgatctgtggtcggacgttgtcatggagaagaattgggccctttctgttgaccagtgccagctgcagacagtacagttttcagtgcatctcatcaatttgctgagcatacttctcagatttaatggtttcaccgggattcagaaagctgtagtggatcagcagcagaccaccagacagtgaccatgacctttttttggtgcaagtttggctttgggaagtgctttggagcttcttggtccaatcactgaactggtcatctccagttgtataaaatccacttttcagttgccatataaaatccacttcttgttgcacgtcacaatctgatcgagaaatggttcattgttgttgcgtaggatgagagaagacaacgctttaaaacaacgatttttttctgattttcgctgagctcataaggcacccacctatcgagctttttcacctttccaatttgctgcaaatgctgaactaccagagaatggtcgacattgagttcttcggcaacttctcgtgtagttgtaagaggatcagctttgatgattgctctcaattggtcattgtcgacttctcatcttccactaccctcctcatctaggctctcgtctcctttgcaaaacttcttgagccaccactgcactgtatgttcattagcagttcctgggccaagtgcattgttgatgttgctagttgtctccgctgctttacgacccattttgaactcagaaataagaaaatcactcgtaaagagaactgtgcattaaaatgatgtataacataaccacatttatttaagaatgtattcgagcatctaacagcaaatttcaacaatgcaaaaactgcagttatgttgcgccagcctaatagaaaagggaaaaatatatatgagagaacataaatgtccatcattttttttactacatttgaaatatgataacattaattgaacacaatttattgtgattaaaaaatgaaaagactggagttctttttttttaatttatattttttattttaaagttcttttgggataacatttcacttattaagattcaaagttatcctcttatcagaatttattgtagatgttcatctgttaatgcagacctgtaatgcagttttacaaatttcatctttgaggcatttttttccccacacaaataagtactgccaattgtatatgatcttaatgagcatattcattgtatggaaggcactaatagaattctctcagtacagctgtaattgttggcaaaaagcattgttttgttttgttttttttcccaagacttttcttgatatttgctatttagtatgcaattacattgcagattaaccacttccaatttaaggttaggtgggagctcctcaattgcatggttaaatggattttgaaatatagaaatttcctttgcacttgcagtgaggtctgaaaagcactgcaggaactatagtttgaacttgcaaaatatatctattgcaaatttgtgtatggagggagatctttttattttaacatttgacaacacaggaagtatataaagccattattacttgtaattggaacagtgttgtcaaaatgactttattgcagtattttctcacgtaagcactgctttgccttgacttttaagtcagattcattaggaaactgtcaaatttgcagcaaattttaatttccaaagctatagtagtggttaaaggcatttctttttgttcagaaaatttcgtttgtgacctcgagctcaaaaaaatcacaataaaactctgtaaccactaagccattagacttctgtgtcataaggcaagtccagattttgtttccatttctgatcaaaatttacagaacttatgatggttaaatctgtgagaataaatgaagttcactggtgacattactggttcagtgatacatgataaattaatgttttccctactggttcaatgatacatgataaattgttttccctattgatgaataatagagtgaagtaccatagctttaaatagctatgctttcacaaactttgtaaatttgttcaactaaacctttttctggtcttcatttatttttgtcaccatcagttgcaacacatcttaacggattccacttcaggttatactgaattggtgctttctcaacttgggaaatattcttgcttattattattttatggagactcttcatagactctaactcttccgtgatttcaagcttggaattgacttcttgagaaaaaactaagcagtatcattaatatctgccagctcatcaagagccaaagaaaacctctacaagtcttttgccttgttttttagttgaatgttagtattgctcccagtgtcctcatctccagtagttattctcactgaaaggttaaacaagtttattttctctggaaacattggtggctacagccaaatacaatttaattaactccccatgggtaactggatttccttgcttggataataaatgagatacccggaagcttaatttgtttgcagctgtgtgtgtgtgtgtgtgtgtgtgtgtgtgtgtctgtgtggaaattctgctgtgatgagatactttgttttatattttcctgatttctctgatgataacttcctttgtcttgcgaatgtgatgagtgcttagtctggtagtatcgatgtatattgtatagtacaatggtttgccatctaactcgataacaaaacaattcacatactactttaaatgccttaaaagtgtgacatgcttctcttattttgacaggaagatcaaatgtggtataacagtatactatggtttttgaagcacttgacaagtcataactgtcactgcaatttgtagtgcatccagcaactgtgtaaagtgaatcattctgttacaacccctcaactctgctatcataatgcaaacacagctataggcaatgcacaaaggaatgagttgtgttccaataaaattttatgggcactgaaatttaaattttatataatttgcatttcatgaaatatgtttttcccttaattttattcaaccatttatagaagtaaaagccattatttttgcattacttttactttcaccattacataaaagtatgtatgggctgtggactgtacaaaaattttacgtaggcaatgggctgtagtttgccaattcttgctatagagtagtgctgcactacttcacctttccacaagactttttctctctatgaattccctatctaagtgaatgataccaccattcatccgtgcaactgttcctaaaatctggagtcattcttttaatatcattgggttccctaagttttagcaactctactactttgaattaaacctcccacctctttactgtaaacatgtaagtttaggcccttattacctcttcttgagactacactacccttttaacagatgttctttcccctggcatccctcttcttgaccagtttttacatgctgctagagtactgtctgagttcatttgggctgctgtaacagaatactatatattgggtggcatataaacaacagatttttttttcccacagttctggtgactgggaagttcaagatcaaggtgctggcagattcagtgtctggtcaaggcctgcctcctggtttataggtcatcttttctatgtaacctcacacggtagaaggagtgaggaagctctctggaggttgagtttataagggcactaattccattcacaagggctccactctaatgacctaatcacctctcaaaggccctaccacctaatatcatccacattgggagtaggatttcaacatatgaatttttaggggacacaaacattccatctataacaagtactctttctaaaatgtaaatctgattgttttactccttagacatattttgtaacggttttccattacctagagcagggttcccaaactcaaatgtaactgattaaaggtaattaaatggtgatttttttttacatacccttttttttttttgcatattgagtaaaagagaatattttttatttccatgaagatggctttctcttatttttcttaaagtatgtctttctttttgtctttcattttgttactttgaataaaaaagaacagcttagaaatacatttctctgctataacaaagacagcagcaaaaacatgatgaatggcatctaacactggacatcattctaaggatacagaaggaaatgctgggactatggcaactagagcatttgcccaacctggaaagggattccctgtgcaacctcaatgagttttgccctaagaatgtgggcccaaggaagtcacatttttgacttttcaaaagaagtcagaaaccagatttttaagtctgaaatcttcagatggctggttttggaaatggaaaaatattgtgagatctggaacctcaaatgatgatattatggttctctctctacttggctagattagggaactgaggatcagtaagacctgtcaagagacaggtctgagttcatgcctttagttaggggcagtgtcaggcctagaatgttgatctctcaactcctatactagtgttctttttattataccagactagctccaatttgttactgaaaaaaagcaagcgcacacatacataacacacacacaaacatgaagaagctaatactaaggattcatccaagtaagtgagttgatggaaaactgttgtccctttcggacatttccactaacagaatccagacactaatcacctcattcctgtagtactgagatactagactttctgctccccagtcctttctatatactatgaccagattaacatttttaaaaagacactacatcaattgtattactttcttatacaagaatctaatattgcttcaattgcctatcatatcaagtctaaaccatgctgagctttcaagatccatggaactttgctacctcttatttctcattactctctggaacacatcttcctttcactgtcccctatattcttcgtcataacaccagtatatctttgattctgttattatattatttcttctagaatagcctgttttcttctgtcttcttagtcatttttcatagtctaactcattaagacggcttctgagttctactgacctctcatttctgtggtacctactactacttagatttcaaatctcattcagtgatgtagttctattcactcagtgtttcatatttctttttggcatttggtaaatacttgtttgtagatgttacaaagtcactacagatttaggtcatgctactactcttaacaacagtatcctatagtgataataggaatttttataatagagtttgtcaggcagcagcctgtgggccaaatataccatgtagatggattttgttaaggagattttagaaattggaattaactgttaacacttaagaaatttctgatgaaaatacgctttctagccaagtggtggcttacgcctgtaatctcagcactttgggaggccaaggcggatgtgtcacttgaggccaggagttcaagaccagagtggccaacacggctactaaaagtacaaaaattagcctttagtccaaccaagttactcaggaggctgaggcatgagaatcacgtgaacccgggaggtggagattgtagtgagccaagatagagccaccgcattccaacctgggcgacagagcaaggctccatctcaaaaaaataaaaaatgtacaataccctaggctgcattcccattaaacagtcatctgtagttgtcttttaggcagggtatgaggtccccctagttttcattacttcttattatcttatatccttcaaatttcactcattaaaactcctgtttatctggttcctggaggtatctgaattgctaaagatttaattatgttcaaaattactgtaaagttgaatttatattactttttgaaaattaatattttaaaattaagaagttaattgtgaaaatttaatcataaaagtagtcaagagcacagttaactacttatgatctatatagtcactaatcatggttaaactgaatttttaattaatcagaatgatataagaaatcatagagatatggaatagattctctgctctcccatgaactgtgtatagccttcagcaagttgcttaagctcttttatatcctcattttatatatacccttaagatattatcattgtcattgattaagaaccacagaatagattccaaatgaaggaaatggggggcctattttataaggaaataatacaaattttaatatggaaactttcaagctcagttacctcataaggacttcactagcctaaaccaagatctgttggattttttctttccttatttttggccttgcagcattaaataaattttctaggaaaaatggcattccattttaaaaagtcatcatagtataataatagggccactaggccgggcgcggtggctcacgcctgtaatcccagcactttgggaggccaaggcgggtggatcatgaggtcaggagatcgagatcatcctggctgacatagtgaaaccccgtctctactaaaaatacaaaaaaaattagctgggcatggtggtgggcacctgtagtcccagctacttgggaggctgaggcaggagaatggcatgtacccaggaggcagagcttgcagtgagccgagatcgcaccactgcactccagcctgggcgacagagcaagactctgtcttaaaaacaaacaaacaaacaaacaaaaataataataatagggccactatattttttctaaggaacattattatgtcttagcattttataatatatgagttctataacatttaaaataactatatgcaaaagaattacataaatgatatataattttaaaattttaagataattacatttaaaaaatttttaaatgatataaaaaagtatataatttcagataactagtaaatgattgttggaatttttttttcatatggaaaaaaacaggaattgaactttttttttgtgacccagaataattttttttgagatgcaaattatttatatatacttacatgtatacatatattgcataatttatatttttgacattataaaatattttctgaactttaagttctgtactttaagtcctggggtacatgtgcacaacgtacaggtttgttacataagtatatatgtgccatgttggtttgctgtacccatcaactcatcatttacattaggtatttctcctaatgctatcccttcccctgtccccaccccatgacaggcccccgtgtgtgatgttccctgccctgtgtccaagtgttctcattgttcagttcccacctatgagtgagaacttgcggtgtttggttttctgtccttgtgatagtttgctcagaatgatggtttccagcttcatccatatccctgcaaagggcatgaactcatcctcttttatggctgcatagtaatccatggtgtatatgtgccacattttcttaatctagtctatcattggtggacatttgggttcgttcccagtctttgctattgtgaatagtgccgcaataaacatacatgtgcatgtgtctttatagtagcataatttatagtcctttgggtatatacccagtaatgggattgctgggtcaaatgatatttctagttctagatccttgaggaatcgccacactgttttccacaatggttgaactagtttacagtcccaccaacagtgtaaaagcattcttatttctccacatcctctccagcatctgttatttcctgactttttaatgatcgccattctaactggtgtgagatggtatctcattgtggcattgatttgcgtttctctgatgactagtgatgatgagcattttttcatgtgtctgttggctgcataaatgtcttcttttgagaagtgtctgttcatatcctttgcccactttttgatggggttgtttgtttttttcttgtaaatttgtttaagttctttgtagattctggatattagccctttgtcagatgggtagattgcaaaaattttctcccattctgtaggttgcctgttcactctgatggtagtttcttttgctttgctgaagctctttagtttaattagatcccatttgtcaattttggcttttgttgccattgcttttggtgttttagtcatgaagtccttgcccatgcctatgtcctgaatggtattgtctcggttttcttctagagtttttatggttttaggtctaacatttaagtctttaatccatcttgaattaatttttgtataaggtgtaaggaagggatccagtttcagctttctacatatggctagccagttttcccagcaccgtttattaaatagggaatcctttccccatttcttgtttttctgaggtttgtcaaagatcagatggttgtagatgtgtggtgttatttctgaggcctctgttctgttccattggtctatatctctgttttggtaccagtaccatgctgttttggttactgtagccttgtagtatagtttgaagtcaggtagcatgatgcctccagctttgttctttttgcataggattgtcttggcaatgtgggctcttttttggttttatatgaacttgaaagtagttttttccaattctgtgaagaaagtcattggtagcttgatggggggatggcattgaatctataaattactttgggcagtatggccattttcatgatattgatttgtcctatccatgagcatagaatgttcttccatttttttgtgtcctcttttattttgttgagcagcggtttgtagttctccttgaagaggtcgttcacatcccttgtaagttggattcctaggtattttattctctttgaagcaattgtgaatgggagttcactcatgatttggctgtttgtctgttattggtgtataggaatgcttgtgatttttgcacattgattttgtatcctgagactttgctgaagttgcttaccagcttaaggagattttgggctgagatgatggggttttctaaatatacaatcatgtcatctgcaaacagggacaatttgacttcctcttttcctaattgaataccctttatttctttctcttgcctgactgccctggcgagaacttccaacactatgctgaataggagtggtgagagagggcatccctgtcttctgccatttttgaaagggaatgcttccagtttttgcccattcagtatgatattggccgtggctttgtcataaatagctcttattattttgagatactttccatcaatacctagtttattgagagtttttagcatgaagggctgttgaattttgtcaatggccttttctgcatctattgaattaatcatgtggtttttgtcattggttctgtttatgtgatgaattacatttattgatttgcgtgtgttgaaccagccttgcatcccagggatgaagccaagttgatcgtggtaggtaagctttttgatgtgctgctggattcggtttgccagtattttattgaagatgtttgcatcgatgttcatcagggatattagtctaaaattctctttttttgttgtgtctctgtcaggctttggtatcaggatgatgctggcctcataaaatgagttagggaggattccctctttttctattgattggaatagtttcagaaggaatggtaccagctcctctttgtacctctggtagaattcggctgtgaatccgtctgtccctggactttttttggttggtaggctattaattattgcctcaatttcagaacctgttattggtctattcagagattcagctccttccttgtttagtcttgggagggtgtatgtgtccaggaatttatccatttcttctagattttctagtttatttgcgtagaggtgtttatagtattctctgatggtagtttatatttctgtgggatcggtggtgatatcctctttatcattttttaatgtgtctatttgattctgctctcttttcttctttattagtcttgctagcggtctatcaattttgttgatcttttcaaaaaaccagctcctggattcattgattttttttttttttttgaagggttttttatgtctctatctccttcggttctgctctgatcttagttatctcttgccttctgctagcttttgaatttgtttgctcttgcttctctagttcttttaattgtgatgttagaatgtctattttagatctttcctgctttcccttgtgggcatttagtgctatacatttccctctacacactgctttaaatgtgtcccagagattctggtgtgttgtgtatttgttctcattggtttcaaagaacatctttatttctgccgtcactttgttatttacctagtagtcattcaggagcgggttgttcagtttccatgtagttgtgtggttttgagtgagtttcttaatcctgagttctaatttgattgcactgtggtctgagagacagtttgttatgatttttgttctaggaattgaacgttaaaaaaaaattgcctttaaaacggtgagaaacacataccatcaaagtttttttgacaagaaattcatcagattttaaaaacaattttttaacttttctgaaaattgaagattcttcaagtaacttcatgaaagatgaaactgatcattacaaaatgcaaaacttacattgatgtagttgtgtttcagagaaataaaaatgttgatttgtttttaatattataagctacatttggtctccaaaatacagttagagcaaagaaaaaatagtatgagctgatgattttcctttagttgcagaaatgcatttctggggatggtgatgtggtggtaagctctaataaaaactgtccagtgtgtcatatttctggcttttatgtgttgcatacaaagcaccatcagtcaaatgagcaacacaagactaccatattaggcattataaacagtgacaaagtataagtagtgcaagtagtcatatttctagttttgaaatgcttaaactctagtagataaagaataatagaaaatgagcgataaaaaaggacataatttagattgtcaagagaaaacacagacccctaagaatttaattaagaggacagattatatttactttttcagcccctaatacagcttcttggacatatataagtgttcattacttaaaatgatctggaactttttctagaatttattatttattcagttaaacacttattgaaagctaaagtgtgtattcagcattgtactacccttgagatactgtggcagactgcttcctggtacatttcattgtgatttttttttttttttttttgttagtcactaattcagatacatagacagttgttacctagtacaactagctaacgtgtttggattataaattcattttggaagagcttacatctatataaaggaaggtacagacagtcctttgcacagttctgattagcacaatatctgtgtaactttcatgtaactgagcaaagttcagctacctatacagaaggaagagcctgtacttgcagacacacgtatatctggatttacccaactttggcacttattctgggcaagttattcagcttctgaattagctttctcatctattacagtcagataataatatctatttcacaagggagttggaaatagtacataaagtgatatccatataatttttaaaaataatgttatctgtagggttttttccccttttattttagattcagggggcacgtaatgcagtttgttacctggataaattgcatgatgctgaggtttagggtacaaatgatcccatcacccaggtactgaacatattaaatagtacacagtagtttttcaaccccaagtaattttaaatttccatttccaaagctaaaaatataatcgtttttagaaaactttatcttgtattcagagctaaaaccaatcaaagactataatgctgtttattgtactattttaaccaaaccatgtggtgaatattaagttatggtagctgattatatttttagaagataatcacaacaatgtctcttgccccacatatttttttagaacttcctaccactcattaagagttggggtctaattctcctattgaatctgagcacacttatgtaaccattagaatgcagcagaagggatgccatgtgactttcctagcttaggtcataaaaggcaatgctgcttccgctctgattgttggaataccagcctgcttggagccctgagaaatccgagtacctggaggttgctgtgtcaggaagctaagccttgtagaaaggtcccaagtctcaggtatcagatttcaggtcagaaatcctagtctttgagtcctttcatgccagtcaccagccatgtgagtgaatgaactgttagatgatttagatcatgccagcttcagccactgagtcactcccagtcacccctagcctttgagactctgcatcaaggctgtagattttgtgaagtagagaccagccatcttgaatgtgccctttgtgattcccgattcatagaatctatgagcgtaataaaatggcttttgttttatgccagtaaatttggggtggtttgttatataaaaacgtttttatataaaacactgaaaagatacatttcctcagtgagcaatagattgctattgaaattcatcaaagtaggaactacctgctgaataaatgttaactgagtttttctttcatttcaaatgaagatagcctaaaaagacatttgcctagagaaatttggtttctttacttgttctttattctgacattaattgtcttgaagagatattaattgactgttctagcagccaggaaagaaatgtatatgcttaaagagtgctgtgggttttaacatagctttatgataaattttaccagtttggctaatgaaaaatgtcaattagtacttttaaattattaagaatagtttccacaaaagtttagtatttttattaacacaggagcctaataaaaccttgtaggaacaaaggaatatctgtactgatctctccaactgaaaattgttatccctgatactaattttaatgttaatgtaaaatattagcatcatcactagtatatttggcagttgtttgagtcatctttcctgtcacttcttagaagacagtggattttctaggttgatcaccattgaataaaattataactgtcataaaattatcaagggatttctgttatgtagtacatattatgatttcctaaaataatataataattataataatgggcactttttattaatatattaatatttataataaataattataaataaattataaataatttaaataaataataaatttaaattataaataataaataattgtaaataaacattataaattatttataatatttatttataaatatattcatatttattataataatgggcacattttattaagattattgccatggctgggcacggtgggctcatgcctataattctagcatgttgcgaagctgaggcaggaggatggcttgagctcaggaggtcgagaccagcctgggcaacatagaaagactctgtctgtccaaaaaaataaaattagctgggcgttgtagtcagcacctgtggccccatatattcagcttgctgaggtgggaggattgcctaagcccaggaagttaaggttgcagtgagccattattgtgccactgcactccagcctgggttacagagtgagaccctgtctcaaaaaaaaaaaaaaaaattattgccgtgagtgccaggagccaaagtattgtaggcctgtcgcatccagacacaatgtatgtgattaggctctctctgtgtagagcctaatcacatatacacagacataattcttgaactttatgagaataggtctttaggcattgtgtgaaataaaattttacaaattgtattttgctcttatttattatagtttaatattgtagttgtgaagatcatctgtcagattcttcaccctctcatcaaacatgacaagtaagactagagtgtttctatttcagactaaaatagagttttaattccatttaagaatgaatgaggccaggcgcggtggctaacgcctataatcctagcactttgggaggcctaggtgggcagatcacctgaggtcaggagttcaagaccagcctggtcaacatggtgaaaccccgtgtctactaaaaatacaaaaaattagctgggcgtggtggcaggtgcctgtaatcccagctgtttgggaggctgaggcaggagaatcccttgaaaccaggaggtggaggttgtagtgagccaagatcacgtcattgcacttcagcctgggcaacgagagtgaaactccgtcttaaaaaaaaaaaaaaaaaaaaaaaagaatgaatgaaaaattactgcttagaaaatttttatcacatttctaaaatagagaagatgacttagagtgaaataaagtcattgtttttagtatagcccattttaataaaaatatttcttaatcaagacagtttgtgtcataatttctaaaaaaacatgccagtgcaagtaactcaaaagtaatgtaggttttcaggatttactaaattttcactatagtgagtagtatgagtatcctagcataatttcctgtcctagaggaattttcaatctaatagtagaactatacaagtagggttctatgtacctagaactataaaactaacaaaatgaaaaatacagaaaaaataaaactgtataaaattctacaaaaataatctcataaatagattacaaacttattgatgaagtttaattttgggatttaaccacttggtgtagagttcaaactgcttgactcacacataggacaggttgattacattcatataagcccttatattttatgaaatcttgtaatgaattataattaacctggaacaaaagaggtgtatctagtggatagatgtgtgtgtaagtggtgaataggcacagagttacaatgtcattgcaacctggagagtcatactgggagcaaagaccatgtatatgaataggtatgactacatgttaaagtaataaattcatggattaaggtagaagttaggtgtgtaacatttatgaaatatagtttggagttttcattaaatagaatagtttttagctcttttgtttctcttcaaatattagaaatatttctaattatccaagtactgcatgaattgcctttgaaatattgcacacatgcacctgaacagttacttttttgctcagatattttttttttcagatcatgtgtacataatgtatgttcacaaaacatatttagtatttaggtacattcctgttagatcttgcatctgtggaacttcatcgtggaaactaatttatcaaagtagcacattcacattagtttcatattctttttaattttcaattttattgggaccaagtaataattatgaaggtagtgataaatgattaaactttaaatactttttctaagctctcagttttcttatttgtttttcttttttttactataagttttagggtacatgtgcacaacatgcaggtttgttacatatgtatacatgtgccatgttggtgtgctgtacccattaactcgtcatttaacaataggtatatctcctaatgctatccctccccgctacccccatcccacaacaggccccagtgtgtgatgttccccttcctgtgtccatgtgttctcagtgttcagttcccacctatgagtgagaacatgcggtgtttggttttttgtccttgccatagtttgctgagaatgatggtttccagcttcatccatgttcctacaaaggacatgaactcatcgttttttatggctgcatagtattccatggtgtatatgtgccacattttcttaatcccgtctatcattgttggacatttgggttggttccaagtctttgctattgtgaatagtgccgcagtaaacatacgtgtgcatgtgtctttatagcagcatgatttataatcctttgggtatatacccagtaatgggattgctgggtcaagtggtatttctagttctagatccctgaggaatcaccacactgacttccacaatggttgaactggtttaccgtcccaccaacagtgtaaaagtgttcctgtttcttcacatcctctcgagcacctgttgtttcctgactttttaatgatcgccattctaactggtgtgagatggtatctcattgtggttttgatttgcatttctcttaaggcctagtgatgatgagcattttttcatgtgtctgttggctgcataaatgtcttcttttgagaagtgtctgtttatatcttaacagcaagcatctgtagccgcagcagcagtgaagagaagcatgattttttttcatatcattagaagtcagtgaaatggggaataactggagaatttgattataatacagtagtccccctttatccacagggatatgttccaagatcaagaggcatgatttttgtgcttaaacttttttagcttgctaagaagtaagataatttgaatggtgactgaatatgtgataattatacaaggtagccctttttttactgtagatatgtcacctacccatgaaaatgggacaacttatttaattctcagcaatcacaaaattctaaaatcttttggaataaatttaacattaaagaatctatataaaaatagaaactttcatgtttatcaaggtataaacaaaatgtgggagcctagaaaaggaaggttcctctgactgcaggaatacagaaagcttcatgcaagacttggcatattagttgacttcgccaagtaagtagccatgctagatgtggaaaatgcacagaaaggaattttagaaaagaatttaattctcacaattgtgaaaatgaaagtgtgcttgggaaaaagccaataatgtggtgggactgacacacatgatgttgtgtgagaaagtaatgggagatggcataatgtgagttgtaaaagtttctgatcggtttaggaccagctctggtaaacaaaaaaaaaaaaaaaaaaaaagaaagaaaagtaggaaactgaaaatacaacatagtaaaactgaaaatattataatttttaaacacagtcctttccacttgacatgctaacagaaactactattcctacttcattagagaagcttttaaaaatagcttcattctgtcagatactaaaccctttagataagtaaaacataatattcaagagagattgctattatttccagctgctaagccaggtgccccaaattgacttaatgccattcattttgagataaacttgaaattcttccattcatgcattggctgtattctaggtacttgaaaaccacattagcacagaaatatttttttttttggatttgatgtggatagtgatgctttcaaagtaaagctttgttactagatagttatgtgaaaataatagatacagaaaaaaattgagtgacatttgaagtgaggtaaaaatgtcttgaacttttacaagctcagttagcagttcttgtgtacttgtctcctgtcggttttatcatcagcaatggtataattgtccaaagataacaaacacatatctatctatatacccatgtatctacttactggcatatagtaaagtgatagaattgattaacatttaaaagtatgaagttttagatccaataaccttgaaaataaagctaccatttctgaataatattgtgaggaagataaactgaaaaatgccaccacaaataacataaagaatttcatgacttcctagtttaacatgacactgtcttgagatttgttctttgggacagtcctttcttcacagtcaagtgtattctttgttgttggtgatgatcttaagtacttttatggtcaaattatttaaatattaaaacagcatcactttcctcattagtttttcttagattgatgttaagaaaggaactgatagctaaaaatttaggtcttatgaaaactcttccattgcagcaagtacttacagaccagtaaataatttgtttctggtttatagaagagaggttggagcataaagagcctctggtgcctaagataaaagaaaaaaaaggcttggcaaagtttgaaggttttagtgggaaagtatagctgtttgtctttaacagagacttttgagaaatgcgaggaatgatagttagctgttcacggttaccagaagttgcatcaggttttatccaaatgtatcaaggcctaaaatgtggtaattctttatattgatagggacataaagcaagtggtctgtccagctgaataaaagaagggaggacagaaggaaagagcataccatcctaatattctgaagggcatgcatatattattcaggaagagaagaggctctgtgcacaactggggtcacactaatattaaaggggcagatagagaaggaagatctattgaagaagaccaaaaacaagtgtttagactgatgtttctaagttaagaggtgtttcagaaatggaaaaactgtctattgctacagagatatcaaacaagaggattgagaaaaattcattggctttgtcaagatatcatttaaaacctttgacagagtaattttgataggcttttagaggacttggttagatcaggttttaaggagcgattgagtgggtaagaagtgggagactcagaattttaatgaccaagtcaactttgctttaaccctttgaagatgtcacatatttcacaagacgaactagaccatatgttgatatataggaaagaaattgttttaagaaaaaattttattttatttgttaatacttctccatttctatctctacttactgcctcattaccagccagaggctgacaaattttcattagaacaatttcagtgcttttaaggaaatgtaaaatacagctctctggaattacacaaaaagtaatttggatgctaaggatttactactgaaatttactgtcatggtttgaaggagtacaaaaataatatcctctgtttcttacccaagcttagaaccactggagatataagcatatgagtcgtctgctagaatttaaaatatctgctttaaaattaataaagtctagagttaaggcctctatttgtagagtcacaatgggattactagtaatttactgctgaattatacatatttactcattttgtcactgtacacctggacagccacaggtgtagaacagaaaattcttgttgtttctaaaataacaggaatgcagaaggggttgagccatacatgtccagtagtcctcagccttaatcagataaatcagataaatctttcctcttctggaaaatggaagctttcatattgtttcggcttagcagggcaactaacctttaaggaactgccaggtgtccagttttagtatatcagtgaatatccgcaattatctgaaaaggctgttaaaatactcacgtgttttccaactacgtatatattgagactaaattttcttcatctattcaaaccaaaacagcatattaaccaagattgaatacagaagaagatacgagagtccagtcatcttctgttgaaccacattatggagattttttttttttccttttttttttttaagagatagggtcttgctctgccacccaggttagagtgcagtggagcaatcctagctccctgtagactcaaactcctcaggcttaagtgatcctcccactgcagcctcctgagtagctgggaatacaggcacatgccaccatatgcagttaatttttttatttttatttttcttagagaagaggactcactttgttgcccgggccggtatcaaactcctagcctcaagtgatccttccaccttggcctcccaaagtgatgggattacaggcatgagccaccgggcctggatgaaatttctaaaaatgtaaaacaatgccttatgtaagtgataggttgatgggtgcagcaaaccaccatggcacatgtttatgtaacaaaactgtatgttctgcagatgtaagccagaacttaaagtataataaaagaaaaaaaaaaaacaatgctattcttcttgctaaatttttttgttaggaaataatttttttcattaaaatgctaattatgttaatgtgcagtaggtttataattgttacatttaagtaaattactaaataattttaaaaagtctcagttttgattttgtagtatgttaaatgtctatagcaataatataaacaaaagctctttgggattctcaataacttttaatagtgtaaagaggttttgagaatctgtgatctagaggaattcacatataatttaggaagaaagcatagctttataatccaaaatatgcatgttagggcttaaagcagtactttgatgtgaagtatttttgaaatgacagtgtaagttttgtagttatcacactttgtattatttggaatcatattattttgaaatttttctaaaccttcattttttatgtctttaatgtacaacagaggaagtgaacaatgaaataaaatgtttgtaaaactatataattttttatgaacatttaatttttctaagccatagatgctttcctgaacaagctcaataagttataagaatatggaaaaaagatgttctttgataatatttggaatattcctggtatcttacacatagcagaatgaatatttcatatctgagttaagtgaacaaagtgcatttaaaatttttttaatagtacagtctaatgccattttggaatgtacgtggaggttaatttgctattataggaagctctccagtttagtggtaactgtttatccttttgtcatgtaacatatggtggtcataaggttgagtttctgatttttttttttctttaagcagataatctcagtgataccttgaagaagctgaagataacagctgttgacaagactgaggatagtttagaaggatgcttggattgtctgcttcaagccctggctcaaaatagtaagtttcattatgtttactcaaattccaaagaagaaaatcaaatcagtagtcattcagaaactggtatgtagttaagcacataactttgtattcatataacttgaattcttttgaatcatatccctgaatactgagattgttttacatgttctaccctcctacttccctccacgcccccgcaagatcctcaaagccaagctgataggcaaagaaaggaggaattgatgggtggtgatgacattaataccagtcccagagagaggccattgtttcatttctaacagtcaagcatcgtagttgtttttcttagcacctacatctgtgctttaaaaatagattgttttatatgtggggagagtggggagggagagagaggagaaacagagggggagcttaaaacacttaacatttttttggaatcttatcatattttaaaataattgtaccttaaaataatatgtatgcatagataaatttggaaggaaccattagaagtcatcaaaaatcttttgaaattggggtaggattttatctttgatgtgataaataatgctagagatagaaactgcacagttcttcattgaccattgtgttgcattttatttatcctatttctagtcactaatttctgtattatcaccattaatagatcagtatagagtgattttcatttgttatcttaattctgcttggttgtgctgtggttttttctgtacttgtttttaattatgctcttgtcctatcctgaaactaattatgtagctgacaaagaatggaggggaacgtatatattgttaaggttttaattgtaaggtttcaacacttattgatatatgttttttttattttttagtaaaccttgattagaaaaatctaaaataattgattgcagtacttttcatcaaaaaagcacattttagagctagcttttaaaattatttttcagtaattattttagattacaactgtcatgctgtttaatcatagagataacaggaagagatttgaaacaaggagttcaataagagcatccagataaggctcaaaatggtaaagaaaaaggacaggaaaggagaacgtctaagcctgctatccattttagtggacacatgtggctatttaaatttaatacaagtaaataaaatgtaaaaggaagttccttagtctcacttctcagtagttatatttggcagatgaccactctcttggggatcacagatataaaatattcccatgatcacagaaaattcttatggatagcactggtctagaaactaggaagaaccacacgatgacctgatttttttttacatgtgcctgtataggcagctttacacagtaacataattaacctaagtaaattgagtatctcaggtatatttttttgaacagttgttttattataaccttcgtctgttttcagcaacactttttttctctgttagacagtaaacttttaaatagaccatttgctttagatactgaaggacatgaagggtcatattcttggtcatctgtagaggttgcccatttgtctcctaggaagactggaagacaaagagatgaagttgaagggaaatgaagaaaaaagggagtaaaaagtgtatagcttttaaaagaacagatttaagaaacactgagaagttcataattattagattaaattagcttacattagaataagcccattgcggacttattcactgtaccttttgttgaaaatggtcttgtgaaattgtgtatcacaaaatgttaaggccacgtaaccacaaggtattaaaacaataaactctcaccaatttaactaatgatgccccaggaagggaacaaaaggaatgtcttgttaacaatctgaaacaaaatttataaatgccctcaagcctaagactactgacaaagaagaattggaaaaaggagttcatgcagatgttcagtctttgacacctgtcattggatcacttactgtatgtttagcactgggctggggattatagccactatctaatctttcctatagtcccatgaggtaggtattattatcaccatttaaaggatgaggtaacagattaataagcttatttgccttgctctggaagaagccagagtttggatttgaactcttgatttacaaaataaaaaattgtaatctgaataaagtgaagctttttgctgagttcatgtaatgtgaaatcattccaagaagctaggttttaacattgtgttttaaatttttgttttttctttaataaaaatagctctaaatttttattaaagtggataagcctgtttttcttgaactataaagtgatatatgtattttataggcatttattgatacactttataaagtcagcatatgcctttttaacaagaaaaagtaaaatatattagtgagatgttaattttctacagttcttccttgaataaggtgattgagccattgctacttctgtcctcctaaatgtaaaattataaaacatttaacttagaagaatctgtacttgctttttaaacaacaacaacaacaacaacaacaacaaaaacacagagagcttctcgtttcataattcttccttagtgtcaggtgttttaactaaaaataacaactgtaccataattgcacctgatcaggaaagaaagatttctccattctgtacaaatataagatggtaatgtatgtaatggaaatataaacaaaattttattttacagtctattaccctgttactggaaaggttatctctgaaaggaacaaaataatgcttttgaaatttttacactgtgtgatttagtgcatttgaattgcatattacaaatgactgtaatctgaaattagaatttttactttgatgtatggctttagagtggttttctttttttaccattggcagtatttctctctgtaacgtttatactatatgtgtctatcttaagagacaagaagatttgaatacttactagattttatgaaaacattttgtttaagcaagcattttgtgtaaatctatgatctaaattaatataaagtcattcattcactcatataaatacatcagatctcagttttaaaatgtttttagtaaatgtgtgaaggctaccagccaagaaatcagcttctgtttattttggtctcttttgattcagattatagttagaagattctcagtaaatgcttatttgattgtagtatggttactctattttatggttatttggaaatgtaaaacaataggccacctattttcatccccaaacattaagacaggaattgtctttggagaatgtggcatctaaatcaccttgcaagagaaactattagtttaaattaaagtcccaaaggcaagaaaaattaacattctatttgtaataaaaattctatccattttattccattttgaggatgaagaccattttgtgttgccggggggaccataaagtgtgccatacagctttaaactctctccctgaagaagtaagctgtcttcccctgcctcgttctcttttttttttttttgtatttaacttagtttcttgcttgatggcaattcccatttcatacgagagtcacgtaattgtttattttttatagaacaactctgtgagatactgcgtgtttacttgtctttaaagaaaaaaagcatttaatgtctagttccacatctctaatcttctatgataatattcactcacatgttgaattcttgctttattttctagccctaaggtaatttgctagcccttgttctttatttcatttgttgtattgatttttggctcccttctaggctacaatgctaagcatacgtaattataggcaaacttcattttattgtgctttactttattgagcttcacaaatactgtattttttacaaattgaaggtttatggcaaccctaagttgagcaagtctttcagtgccatttttccaacaccttgtgcttactttgtgtatctgtgtcacattatggtaattcttgcaacatttcagacattattattatatctactttggtaatctgtgtcaatgatctttgatgttactattgtgattgttttggggtgccgtgaaccatgcccatgtatgatggtaaacttaattgataaatattgtgtctgtctgactgccccaccaactagctatgccgtaccccctactccccatctctattcctctcctcaggcctccctattgcatgagacacaatgtttaatttagaccaattaataatcctacagtggcctgtaagtgttccagtgaaaggaagagtcacatctctctcactttatatcacaagctagaaatgattaagcttattgaggaaagcatgtcgaaagcggaggcaggttgaaagcaaagataggccaaaagctaggcttcttgagccagttagccaagttgtgaatgcaaaggaaaagttcttgaaggaaattaaaagttctactccactgaaaacatgaatgataagaagtctaaacagccttattactgataggaagaaactttgagcgctctggttagaggatcatactagccacaacattcccatgtcctaatccagagcagggctctgattgtcttcagttctgagaaggccgagaggtgaggagactgcattaagaaaagttggacactagcagaggttggttcatgaggtttaaggaaagaagtcatcttcacaacactgaaagtgaaagatgaagcagcagctgctgatggagaagctgaagcaagttacccacaagatctagctaaaatcattgatgaaggaggaggctgtgctaaacaacagattttcagtatagatgaaacagcttggtattggaagagatgccacctaggacttttataactagggtggagaggtcaatgcctggcttcaaaggacaggctgactctcttattaggggctaatgcagctggtgactttaagttgaagccagcattcatttaccattctgaaaatcctggggcccttcagaatgatgctaaatttctctgcctgttctctgaaaatggaaaacaaagtctggatgacagcacatctatttacagcatggtttactgaatgttttaagcccactgttgagacatactgctcagaaaaaaaagatccctttcaaaatattactgctcattgacaatgcacctggtcacccaagagctctgacgtacatggagataaatgttatttttgtgcctgttaacacaacatccgtggatgaaggaataatttcgaagccttattatacatttcataaggctatagctgccatagatagtgatttctttggtggatttgggcaaactaaattgaaaacctggaaaggatttaccattctagatgccattaagaatattcatgattcatgggagaaggtcaaaatatcaactttttttttattatactttaagttctagggtacatgtgcacaacatgcaggtttgttacataggtatacatgtgccatgttggtttgctgcacccattaacttgtcatttacattaggtatttctcctaatgctatcctttccccagccccctaccctacgacaggccctggtgtgtgatgttccccccgctgtgtccaagtgttctcattgttcaattcccacctatgagtgagaacatgcagtgtttggttttctgtccttgtgatagtttgctcagaatgatggtttctagcttcttctgtatccctgcaaaggagatgaactcatccttttttatgtctgcatagtattctatggtgtatatgtgccacattttctttatctagtctatcattgatggacattcagattggttccaagtctttgctattgtgaacagtgctgcaataaacatacgtgtgcatgtgtctttatagtagcatgaaaatatcaacattaacaggaatttggaacaagttaattccctctattatggatgactttgagtagttcaaaaccagtggatgaagtaactgtagatgtggtagaaatagcaggaaaactagaattagaagtggcacttcaagatgtgaccgaattgctataatctcacgataaaacttgggcagatgaggagtcacttcttatagatgagaaaagaaagtggtttttttttttatttgctttggtttttttttttgagacagagtctcactctgtcgcccaggctggaatgcagtggcacgatctcagctcagtgcaacctccacctcccaggttcaagtgattcttctgcttcagcctcccgagcagctgggactacaggcacgcgccaccatgcctggctgatttttgtgtttttagtaccatattggccaggttggtctcgaactcctgaccttgtgatccacctgcccctgcctcccaaagtactaagattacagacatgagccactgcgcctggcctcgaaagtggttttttgagatggaatctactcctggtgaagatgctgtgaacattgaaatgacacaaagaatttagaatattacataaacgtagttgataaaacattgacagggtttgaaagaattgactccaggttttaaagaagttctataggtgaaatgctatcgaacagcattgcatgctacgggtatcttttgtgaaaggaagagtcaatcaggatgataaactttgtcttattttaagaagttgacatagccacctaaccttcagcaaccagcaccctgattaggtggtggttagtcagcaacattcagcattgaggaaagatcatccagcagcaaaaagttatgacttactgaaggctcagatgatcgctagcatcttttagcaataaaatattttttaaagcaagctgtgtacattgtttctttagacataatgctcttgcacactcagtagactacagtatagtgtagacagaactttttttttttttttgaggcggagtcttgcactgtcacgcaggctggagtgcagtggcacgatcttggctcactgcaacctcctcctcccatgttcaaatgattctcctgcctcagcctcctgagtagctgggattacagatgcccaccaccacacccagctaattttttgtatttttagtagagatggtgtttccccatgttggccaggttggtcttaaactcctgacctcaggtgatccaccttccttggcctcccaaactgctaggattacaagcatgagccaccgtgcccagcctgtagacataacatttatatctattgggaaaccaaaaaacaaaaaacaaacaaacaaaaaaaactggtgtgatttgctttatagtcactttattgaagtgatttggaaccaaactcacaatatctctgaggtatgcctttatgtacagaaggtgttaatctagattactccatgagtcttgtctagcagtaaaaacttttgttgtcatttgctttagtcagctttatgcatttactatttttgaacagacttactttcaggtagcaaagttacttcctaagtaagagagttcttattatcaactgttttttttttcctgtatttgcaatctctgaacatactcctgctgttttagtagagatgaaaaattattattttattctttcatagtagtatcttgaagagatttttacctttttatctagtgttatcaaatgttccacagaagtgatgtatttcttttgcgaactgaattcattattattatttttttttaccttctttactttttttcatattgtatacctcttttagtgattgtgttcattgtccatgagggcttagcactggtgctccttatgaagtagtgaagattcagtttttaccaaataaagacagcatttggagaatataggagattctcaactaaagtgtcaactaaaaagacattgacaattcctgatgggttgagactcctggattgccataggatggtggtggcctcctaaatctgtatctttccatgcattctctaaaagtccacacagatccacaaagagataaaaccaactaacaatattctttgtctccagcataactaggagacagacttcaaattattacagagataaataaatatccaaatctagcctactcagcttcagagaccactgcagggagagttaagactccagagaccacatggacaagaggagagggaaatggggaaccaggagcccaagggtaatagcacacaatgaaaattacctttagaaagaaaaaaattcctaccctagtaggaaaatagtgcgatctggtcttagattagattctaacattggctacttaaaagtgcatggactccaggtgacaggtcaggaaagcaccactttggggatggagttgttcacctttatatacttggtgatgaaaagaaagaagcaagagggagaaatgaagtgttctgtagaaataaggaaaccacaaaatcagaagacatactaattaccccactttggtctcagttcagaagagggagcatttgaactaaaaatcctggatatttatcccaaattgttgcccttactgcattcaatttttattactagtcaaggaaaataaaaaattatacactgaataggaaatttcagataagatacatacataggtgctacaaaaaagaaagcagaaaataagaataaaaacattttagctattaaaaattttccatctaagccatctgtgttgcagttatcattaacagaacaccatgacctatattaaatattcttaaataagcctttgcagatatgaagagaagaaaccttcaagttataaattcagaaacttagaaccaaagtgaacaccaggaagatgtgaaactagagttgaccagaagaaattgaagaaaatgacaaaattgctttaaaaattaagactaaatttcaaggtgcccaaggaagaatagaggtgattgaaaatttaaaaaggggcattgaggaaagagatgcaaacaggcaactgagaagacaaaggatcagagaaaagattataatacagaagatagtcaaaaagatccaacatacatgcaattggaattcagaagaaggaaaacaaaatggtgaaacagagatagtatttaaaagtacaaagtttctaaaagtaaaggaagaccagaatctgttttttgaaagggcccaccatatacttgtgaaaattgacctgaaacagtcaactgaaagacatagtgtaggaaaacttttagactttaaagataaaaacaaatacagaggaaaaaatcctcaaggcctccatgcaaaaatattatttacaaaggaaagaaaggccaggcatggtgacccacacctgtaatcccagcactttgggaggccaaggtgggcggatcacttgaggtcaggagttggagaccagcctggccaatatggcaaaacctcgtctctactaaaaatacaaaaattagccgagtctggtcatgcatgcctgtaatcctagctacctgggaggctgaggcatgagaattgcttgagcccgggagacggaggttgcagtgagcagagattgcgtgactgcactctagcctgggcggtagagcaagactcagtctcaaataaaaaaaaaaaaaaagaggaaagaaagtcagattagcatcagacgtccacatagcaatacagaattcaatagtggtgcagtattttcaggtaactgaaggaataagaattttatattgaaccaagctgcccagtaaaaatcaaagctgtagaagaatcctgttaaagatagaagaatcaagggaatactgtactctttgccttctagaagaatcttcttaaacttgcactgtttaatacagtagtcactcttcaacatggctgttgagcatttgaaatgaagctagtctaaattgagatgtgttgtacatctaaaaaacatacaaaatttcaaagacttagtacaaattaaaaaatgtaaaatagtcattaatagttttagaaatattgattatatattaaatcttattttaaaaattttgtgaaatatttacaaatgctttgtttctgctgaagctttataggccagcatttcttggattgtgggtagtagctgatcaaagtgcttataagacttgggccagtcagtgtgatatgatggaaaatgcaggttagaagaaaataataagtaaattaataataatataatataatataatataatataatataatataattggggtattcagtataggaagagaactttttaaaaaaaattattttaagttctggaatacatgtgcagggcatgcaggtttgttacataggtgaatgtgtgccatggtagtttgctgcacctatcaacccttcacctaggtattaagccccacatgcattagctgtttatcctgatgctctccctccccataaccccctctacagaccccattgtgtggtgttccccttcctgtgtccatgtgttttctttgttcagctcccacttataagtaagaacatgcagtgtttgggctgctgttcctgtgatagtttgttgaggataatggcttccagctccatccatgtccctacaaaggacatgatctaattcctttttatggctgcatagtattccatggtgtatatctaccacatttccagtctatcattgatgggcatttgggttggttccatgtctttgctattgtgaacagtgctgcagtgaatgtacacgtgcatgtatctttataatagaatgacttatattcctttgggtatatacccagtaatgggattgctgggtcaaatggtatttctggttccagatctttgaggaatcagcaccctgtcttccacaatggttgaactaattcacattcccaccaacagtgtaaaagtgttcctatttctccacagccttgccagcatctgttgttccttgactttttagtaatcaccattctgactggcttgagatggtatctcattgtggttttgatttgcatttctctaatgatcagtgatgttgagcttttttttcctgtttgttggccgcataagtgtcttcttttgagaagtatatgttcatgtcctttgcccacttttaaatggggttgtttttttcttgtaaattcgtttgtagttccttgtaaattctggatattagacctttgtcagatggatagattttgaaaatgttttcccattctgtaggtggtcagttcactccgatggtagtttcttttgctgcgcaaaagctctttagtttaattagatcccatttgtcaatttttgcttttgttgcaattgcttttgatgtttttgttatgaaatctttccccttgtctatgttctgaatgatgttgcgtagattttcttctagggtttcatagtttggggttttacatttttaagtctttattccatcttgagttaatttttgtatagggtgtaaggaaggggtccaggttcaattttttgcatatagctagccagttttcccagcacgatttattaaatagggaatccttgtcgaagagcagatggttctagatgtgtggtcttatttctgagatctctgttctgtcttattggtctgtgtgtctgtttttgtaccagtaccatgctgttttggttactgtagccttgtagtatagtttgaatttgggtagcatgacgcctctagctttgttctttttgcttaggattgtcttggctatacaggctcttttttgattccatatgaattttaaagtagtttttttctaattctgtgaagaatgtcaaatggtagtttaatgggaatagcactgaatttataaattactttgggcagtatggccgttttcatgctaattgattcttcctatccatgagcatgcaatgtttttccatttgtttatgtcttctctgatttccttgagcagtcatttgtagtttggtagagaacatttttaaaggaaccttaggttcattattctagggttacattctaaggagaaggctgtatatagggtctaaaatatgtcctatgtgcttaatctaaaagcagagattaaaaggagagaacagtgtgtatccaaatatattcttacctaggagtttatagaaaagggagcatggaaaggcttgaatctgggagagtgagaaagaccatcttaaaatcaatctctcacaagccatgagattagtaacagaaacaagatgtataacagtgatactgggtgctgtttgccttccgatatgctctgaagcactgtactttataaaaggcaaaaaaggactctcatgttgtgcagttgccagaaggatataaatctccattggtatttgtagttggtgattgaagccttggcagaagatctgggtttgctaacattagctaatgaatgttaccatttttgcttcttaagtttgctacatttgaaaaactttttatgttcctaacacagagaaaatgtgtaagagagaaatgtgatttgaaatgatgctgtatgccaaatacatactgaagaagatttgccagtctcagtatttatagtaccagtactgatttactataactaaggactacactttaaattatacttggggaaaaagagatgaatttgttctgctgtgtctttctaacattatttttcatcagggttccatgtcactgcacctatagccagctgtgggagtagtctgtggacatataattgattgaagttaactgtcttctctaatcgtataagcagtaacccaatgtgtccatccatttgtgctgttataacagaataccacacaccggctatattacaaatagtagagatttatatttctccctgttatggaggctgagaagtccaagatcaaggtgctggtaggttcagagtccggtgacatgccatacctcattgatggtacctttttgatggcaccttgttactgcattctcacatgacagaaggtggaagggaaggagagcgagagagcgaggcagctctctgaagcctcttttataatggcattaatccattataaagtcctcacctcatactactgtcatattggggattaagttttaatacatgacttttgggtgggacacaacatttaaaccacagcacccactatgtcctgaatgtgttcaagaatataagacatgtaaattggcattttaattgatacaatgaattggaaatgaattaatattagtatctgaataagaattatgtattctcaacagaaagctagtttgatacaaagaaaatagctttaagtaataaatagattagataaatgtgttttcattatctttactgtgattgtagatgtttgaatttgaaattaaaggcaagggtagtatcatgctactttttacttcagtagtgcttgaaagtccaagtgggttctattcgctctagaaagctttcttacatcgtctaaatgctttcatttttacctcttttcagattttctgaatacccacttggcattgtaaaacagagaagattaaggtttcatcattaggtttcatcattaggtatacattggaatctataatgagacattttttggaaataataaaatttagtgaatcatttttttctaatggaagcttctttgtaaaatatatgtcttcttattataattaatttatttgtactgtatttaaaaatttattttaacatatggtacatgtgaggacttaattgtattttttttttagataatcaattttcctaatacaatgtgttgtttaatctgttccttatacatatttctatcatggaataaccatttagtttaatataattgcatcagtgtctgagtttttttctgtcccattaatctgtttgtctaatattgtgctgttaccttaccatgctattttaattatggtagctttatggaggaagtttcctattataaatttatttttgaaaaattgttattgttttcatgggtttgttatatcagaaattttgtaaatactttgtcatgtttctgaaaaatcctattggaattgtaataagtcataaattaatttggggagaattgaaaacttctcaatattttgtctgccaatctaagggcatagattgtatcttctcttattctaatcttctttttatgtctcagtaagattaggtagtttggttcatatgctttccatacattactttttaaaaatattcctttgtattttgcatttttgttgttgcgtatggattttttctgtataacttctaagtgattattgttagagattattgtgaaagatgtcttgatttttatatttttgtatgtattcagccaccttctgttcttcattaaaatgaatttttagctaattctcttaggttttgcaatcagaacatctacaaagtgatacttttgtttcctcttgcccttataactaaagccgacttactgtattgggttaagcttccagtgaaatagtaaataacagtgatatggttagcaccatattttagtttccgatactgatggtatggcccttctgatgtttcaccattaaatataacatctcttgatttttatgtaaaagttctttttcagtttaagaaaataataaggccgggcacagtggctcatacctgtaatccctgcattttgggaggctcacgcaggaggattgcttgaagtgaggagtttgagactagcctgggcagtaaataaagacagcatctctatcaaagaatatatatatgtgtgtatatatgtgtgtgtgtgtgtgtatgtatgtgtatgggtgtgtgtatatgtgtgcgtgtatataggtatatacatatatgtgcatatatgtgtatatacatgtatatatacacacacacccacacacatatatatacacacacacactatatatatatatatatatatatatatatatatatgcgccaggcatggtggtgtgtctctctattcccagctatgtggaaggctgatgctcaagcatagaagtttgaggctgcagtgagccatgattgtgccactgcactctagcctacgtgacagaacaagaccctgtctcagaaagaaaggaaaataaagaacaatttctttaaaaacaaaaagattttaaaccacaaattttttgccgaattaatgtgttgaaagtagtctctaccattttattgctataaagcttgtttataataaaattatttgttgagagcattaataataagggaaccttttcataagaaggaaaatacaacaaagttttataatctttgaatcaaggtcatgcagtatactagtgaagttcagtataatttacatcctcctttgtgtattcagggacaaatatttatctaatgagaattagtatgtaaagaatgattggaattaatgacatgaatgtgtatatcttagaaaaaatgactattaaaacatctgacaaacataggagatttcttaatctagtaatgtatagtttcaaaagttttcaaagctacattcaataaagcattgcttttaccaccagaaaattgtttacacttacaaggtcgtattatatcagcctttaaagtatatctgtgtgcctttaaattaataagtattcatttatttgtttatattattcagccctgaaaatgtgaacttaattgcttatgatttcagttactttaaaaaatgtagttttacacagattcacatattgagtgcgtgatgccaaatgaattttggtgtttcaagatttaataatatatgaatagaaatttttaataaattagaacaaaatttttaaaatacttggccttaaagactgtttttgtggccctagaggaaaagagaaacacatttaaccggaaaaagaggtaattgaagtaaattcttctcctttgggaagaattttgtatgaatcttaattcacacaaatctgtaatttatccattatgttaaattggaagagatattacaccatgggaatttgttttataccaaatttataaatctgttatttcattttttatttttactcatttatgtactgtaattttcactttttgaattatgaatatatgtgaatatgcatgaccaaatgtaaaattgttgaaataggaagaataatggaaatattaaatacaaaatagagagtaaaagattagctcttggctctaagtagtcaaggtaagggaaggatagccaagaaatggaaatgatcccaaatttaaaaagaatttgtagaagcacattaaaaatatatagattctagttgaagaaatatagttgtcagaaatatatcttcttaattgaatataaaatactacgttgttttctatttgctatacaagagtatcttgaaaatgccatattcttaattttgtgtggttcatggtcattttattctctcttaaatctctaataattgaagaaatgtgaatatttcatgtttttagtaaggtagggttcaggtataattttctagggtaatatatgtatatacatatatatataatgggttatataattaagagtctttatttgagttaactttttaaaaaagaagttcacttactaaatgtaggtcgactcattagaatagttggtgagtattcaaacagaattgagctcatactgttgtgctatgtcatactgctgttaaatacttagtttaacgtataacataaatgttaaatacttcatttaatcatagattgggagcattttatacagttatatcatgctttgatgaggtaagatttagactatacacccctccatcttcaggtctcattcattcatttattccacacttagtatttatttagtatgtgccaaacattgtgctatctcacaataatgacagaagcttatttcttttgtggagtagagactgatagataaatgttaaattataatttatcataataagtgctatcataggggaatgttcagtgtctacactagatcttagccagagggctgagaagcaatgaggtatgttcagtacctagtgggactacatatttactgaccttaaagtaaaaattgcaatgtcaaatcaaaagggaataatcataaaataatgaaggacaaaaggaaatgatctgattccagtacttaattcagcttattaaaagttcaaatctttgatttttgattgaattcgttctttaaaaaattgttttagaagacaccagaagtactgcatgtaaagcagaatgaactaatttatattgtattatactctgaattactctgataatatgcatgctgatgttcttggatcatgtaccagtctttgaataacaagttctagatgtatgccatccagtctagtagccaccaagccacatatggttattgagcacttgaacggcaaagttgaaattgagataaactataatctcaaagacttattgctaaaaaaaaaagatttaatttttatattgatcaaaacttaattttatctgtttctttttacctttttaaatattgctgctagaaaatataaagttatatgtgtggctcactttatatttcccttggacagccatggctcacacaaatgcttctcaaattttaggctgcataaaattatttggaaagattgttaaatcgtaaatacttaggccctatccccagagactctgattcagtagttttggggtggggctcaggaatttgcatttctaataattttctagaggatgccaatatgctaatttatggatggcactttaaaccataaggttttaatgtagacagtatcttttcagtgggttgaaaagaatgctgcctgggatgaatcaaaagcaataccagttttcacacaatttgttatcgggtctaatctgtaaataagatactgtcatactgtctagaggaatataaatgtaagcattttgctaggcctctgaagaaaaaatgtggaattttgtcaaagactcttaagtattttttaaaataagtatgtgtttgttgtttttacttcttgtaaagagaaaagaaaataactctgtaaaatgggaaagtaagacctagtttgtcatttccaagacaacagaatttacttacattctaaacaaaggagggggagaacaccgtaggaaaaatcttacatacctatgaaggtcccatcgtgtgtgacattggagagagatcttttacttaaagtatttgctttttcttattttcttgtcacagatacatatgataagaaatatatatgtatatttatgtgtgtgtgcacatgtatgtgtgtgttttgagacagggttttgctttgtcacccaggctggagtgcagtagtgggatccatgctcacggcagcgttgaacccccgcactcaagcagtcctcccacctcagcttcctgaatagctaggattgcaggcatacttcaccatgtccaactaatttatttttactttttgtatacatggggtctcactatgttgtccaggctggtctcaaacttctggcctcaagcagtccttctgcttcagcctcccaaaccgtagggttagcaggcatgagccactgcagttagcttcatttttatgttcttaaaaacaattaggcaggggacaatgaaattggaatgaggagtaagataaggcagcaagaaatcagagtgacaggaggaagaagatagaggatggtaaataatggaaagcagtgaggagatagatgattttactaaagttggggaacaaggcttatggtttcttctactatgatacttgtagacctgtttagctcactattctcagggccaggggaagcattttaataatagtatcatctaattttgcaattcatgaacaccttagtaacccagtctccagctaataattctgtttcatccttaccaaatagcccttatgaagagggaatctttcatcattctttatgaggggatctgtttcattttttcatagccctaagactggaagacactttttaatgttgatccctaatcatctttctgtcagctgctgctcattggtcctatttctagctcctagataaacatacaatgtgctttctccctaacaaatcctctgtatttggtgataactgtcatattccttatttcctgagctggccctcatatgatgacaaggagacagtagattgtagggcagaggttgatactatttttttctaatatttgtgtggtacgtttgtgttcttacttggaaatctttgttgggagggctaagatgatcctcttttctaggagcagtggtatattagggttcttcagagatatagaaccaatggaatgtgtgtgtgcatgtgtgtatgtgtatgtttgtgtagctatacatagatgtatagatatatatatatagagagagaaataggtatgggcggggggagagagatttatttaagggctggtcacggtggctcacgcctgtaatcccagcactttgggaggctgaggcgggtggatcgcaaggtcaggagatcgagaccatcctggctaacatggggaaaccccgtctctagtaaaagtacaaaaaattagtcgggcgaggtggcaggcgcctgtagtcccagctgctctggagactgaggcaggagaatggcatgaacttgggaggtggaacttgcagtgagccgagatcacaccactgcactccagcctgggtgacagagcaagactctgtctcaaaaaaaaaaaaaaaaaaaaaaaaaaaaagaaattggctcatgcaattatgggggttgcaagtccaaatctgcaatgtgggttgtcaggttggagacctagggaagggctgatgctgcagttcaactctgaagactgtctgttagcagaatttcttcttatttgggtaaggtgtgttgtttattctgttcagttcttcaactgatagggcacaatgtcccacataaagagcaaatctgctttactgaaaacctactgatttaaatgttcatcttatccaaaaacaccttcacagacagagacatccaaaataatgtttggccaaatgcctgggcactgtagcccagctaattgatagaaaattaaccatcagaagtggaatatacatttctaggtatcaagatggattgtattgtacaatagttatatgttgggataactgctagtgaggaataccttagcattagaactttacacacaagaagctacagttgggcctggtgtggtagctcacagctgtaatcccagcactttgggaggctgaggccaggaggatcatttgagcccaggagttcaagatcagcctgggcaacatagtgagacctcatcgccacaaaaaaatttaaaacattggccaggcatggtggcaggtgcctgtggtcccatctacttgggaggccgaggtgagaggatcacttcggcccaggaggtcgagggtgtagtaagccatgatcatgccactgcactccatcctgagcaacagagcaagaccgtgtctcaagaaaaagtaagaatcacgatcatgtcctactttttaatattcattgaaataaacctcacaaggaggctccaaaaggcagagaaattgggtcgttgttttgtttcttaaagagacataaggattcatagtctagattttagcacacaatgttctgtgaggtgagtccattttagatgcttgtaattttcttttccatggttaagtgttatacaccttttcattgtactaaaggagcaagcagaatgtttttatttggctcgtaataacttagttatggattgatcatattttcattctgatgtgtgcatgtgggagggataatataaaggcaaggtaattttctgcagtgatttctgaaagcttaaagaacatttttgcatacatttgcttatgaaaaaactataatccaagacctgattagcttaatgcaaagtgaaaagtttagtctctgcatgagctagtgactggtaattatatgaaaaacttcgttcttaacttcaaaagaaatcaagtttccttggtgagagaatcttatcaagattcttaatgagagaatcttaaaatataagacaatctctttgtaaactcaatcctcttttctcttaggagtaattataactactgcaacatcaatacatgtaacttgcttcatctttagtattcccatagcagtttatacatccctccagttgaacttatgtcagtgtgtattcattgtttgtataagcctctttcatttattctgttataactctgtaagaggagggatgcagttctattcaactagcattaattgtgtaccactatgcattagttggtaatcttgccctggagagtttagtggtctacatagataagtaatatataagttttaatacagtataatatattatataatggagctgattacgaagtgttgtagaaacagagatatggattcaactcacatttttaagtctttcaaagtgtcacagaggggatgacattttatccgggtcctgatgggtaaatagacattttataggtataccgttgttttttccttctatctagcttttcttcaaatcttggataataccagtcatctactttttacagcttctcaatactggtagccttcagctgttggtcagaaaattactcagtggtagagaatgttgcttttagaaatgtagtgtctgtagtttcagctggtagtgcttttacatattccttccttgtagaatgtatttttctttttggcttagaatatgctttattgtccttaataactccactcaaatgttaccttatttgcaaacttcatgatatttatacatctttgattgtttctcattatagcttgtacataacctccatagtggtatcaatcacattgaattgtggtaatttattaacctctctctgtctcttactggacagttagctctctgaggatatgatttgtgtcctctttattttatattcccaagatagtagcgactcagtaaaaatacactttccttggatgatctcatccactccatgtctttgactaccaaatatgctctaacaacttggaaacaattacagtgctgtgtgtgagtattgaagtaggggtaagtttgataagcagaaccaaggaatgctgaattttgaaaacaaaatgtattttaaccagctaaaatgtgggggcctgaggattatgggaagaacatcctaagcaaagggagagtatatacaaagtcatagtggtgagtaaagaatctagtccattaagaaactgaaaagcttggtatggctagcaaaaagggtacatgcaaggaagggtcaagaggtgaaaagtggaaagggcataagggatcatattatcaaaggacttttatatcatgctaaacatgatttttacttgaaaagcaagtaaaaatcagattggtgttttaaaaagatcagtgtggagacagtgtgaaaggaaaaaaatgttggcacacctaattaccaagaaaggtggtgtgttgacagtgctggagaatatggcatatagagagagtaataaatgtttacattataggaatatggcatacatagggaataataaatctttagagttccagggcctaggaaatgtgaaagggaaatgactaagggtgaaaggataactgaacaatgttgaagggtccagttaagattataaattatgaatttgtagtgataccaggtaacatacttaataacataatttactgttttaaaatcagggaacaggcaaagtatatggctagattcatccagtgctaggatttaatagcaaggtgagataaatagatagggtttagggtactgcagtaatactagagttgttgaaatcattggtctttttttcttccagtgtaggtaagcatgacatgaattatggaaagagggctgatagggaaagaaggaggagttgaaagaatagagttttcaatgaggtttaaaaaatgtttaataagtataaaagacatggtagaagagaagactgatcagaaagtgatttccaaatataagctttcaatcatagggtagttctacctatgatgataggccttgggtgtcatattgtggtggattgttaaagagcagtggaaattattaaagtcagggagtgtgaggccaagttattaaccactgtatgtagattcagagttgttcaggatgatggcaggagttgaaggggagaggcaaactgggagtaagctccagtgtactggagggttgttgtggtactaatgatgagaatgggggaaatacaatgttaccagatggcagaggctgaaaagagagaagctgtttttgaatgaaggcagaagacaaaatgtctcagatatttttgagctaagaaaatacaactttagctccaagcctgggtcttggggtagaaaatgaagaaaagagagttgagaagttctgcatgagagtacttcaagggaagtctcctgagaataatctagctaaaagtgaaagataggagctagagttttgtgagtgtctgaatttaagagattcaaagggtacggtaaaaagtgttcaaaactaggtctgagggggaaattccagtgtaaggatgccgctatgggatgggaaagtctttaattggctgtcgtgcagttaatcttttcccagttgctttgctctgtccatatggtttgggagattgtgatccattttgtcattataatcttttcttttcctctctgcttgagagggtgaattctggtttgactaatattatttccctctttgttcccctgaattaggtactgttaaggggcctccatcacacttttttacccttatcatttaaataaggccagcttgtgataccatgcattccctcttatcttagaacatcttgccttggcctttccccatgccagattgtaggatttttataatttcagcatttgtcgtaggtattagggagatctaagcaattactctagtgccatgatatttagtaaatccagaatcaatctgaaaacctttccgcactcatgttaggctgctatgtattactgtatccccacagtctacaaagaacattatatgtttttagaacacaaacatctccaaattcggggctaaggtcatattgccagtctggcttctactgtcatggggtaatcacatgttaaggtgatagggttggaggaggaggaagtatgggaatgtagtgaagcacgagaactaaatgcagtttttgaagacgagactgaactgatagataattgtgaaatattgcatgtgggaagagtttttgacatctgaaagattctgcaagccacactaagtgtctttattccctaagctatcatggaaccttaagtggccacaggagtcgtgccttagtgtggggtatggagagggagatagttttttggtgagcatcctagtggtgttaacagacgcgatgctctatgctgttacctcagccctgatatttgactatatatatatatatttttttttcttttcttctctttttttttttttgagacagaatcttgctctgtcgcccaggccggagtgcagtggtgtgatcttggcttactgcaaccctctgcctcctgggttcaactgattctcgtgcctcagcttcctcagtagctggaattacaagtgcacaccaccacgcccggctaatttttgtatttttagtagagacggggtttcaccatgttggtcaggctgatcttgaactcctgatctcaagtgatttgcccgccttggcctcctaaagtgttgggattacaggcgtgagccaccgcgtccagtgatatctgactatattcttgaacactgaatctagccactctggataaatatcttgcttagtctagcttagtctcttaatacctttcattttaacatgggacctacaaaaggatagagtacagagatcctcaggggatgcgttcctagacccacagtagatgcctgaaactgtgggtggttctgaaccctctgtatacaatgttttttccggtacatacatacttgtgataaagtttaattattaaattaggcacagttaaaagagtaacaacaataactaatgataaaatattattagaacaatatactgtaataaaagttacgtgaatgtgtactcgctctcctccccatctcaaaatactttattgtactgtacttaaccttcttgtgatgtgagatgataaaataccttcttgatgagatgaagtgagatgaataatgtaggcattgtgaggtagcagtaggctgctattgaccttctggggatatgtcaggacaaagatcatttgcttcaggtgatctgagactgttgagccatgatgatgttgatggttggagttcaggagcagataatgttgatgtctgtgtcaacaactaatgggcaggtagcatatacagcgtggataaaggacaaagggatgagtcacattctgaatcagatggaagtgtgagatttcattatgcaactcagaacggcatgcaatttaaaacttacaaattgtttatttccagaactttccatttaatattctcagaccacagttgactgtgaaaatttccaaaaccgtggaaatgaaattatggaaagtaaaactgctgataaggggcaactgctgtagttctctggggggggaaatgaggttctggaaccatggctgatcatcatgaaggttagactgatagaaacctagaatggattaggtgcctctgtacattaagtatgttgtggaatttttgtcaaaatattaaaactgcttctatacatatctgtctcctttactaaactataaactctttcagagcagagtctgtgtcttgttagccatttgcttagcatgttctaggcacttacctaagtatttaatgatgagtcattgcatgaatctagtaactttcttttgagtggctaacctctcaaaattaatagtgtaacttaaatgtatgtgtaatggtgataatatcgtactcccttattagcatatatttctttgaaaaagcaaggaattttctcaagatatatggtataggtttcctcatactttttatgatgtaatatgtattggtttactgatattttttcagtctcatgtgtattttaagagccattatagttgactgttggaaaattgggttttgtggctgggcatggtggctcacacctgtaatcccagcactttgggaggccggggtgagcagatcacttgaggtcaggagttcaagaccagactggccaacgtggtgaaaccctgtctctactaaaagtacaaaaatcagcccaacatggtggtgcacacctataatcccagctactcgggaggttgaggcacaggaatcgcttgaactcggtaggcgaaggtttcagtgagccaaaatcatgccactgccctccagcctgggcaacagagtgagaatgtctcaaaaaaaaaaaaaaaaaaaaagagagaaattggcgtttgaactacacaggtcctcttataagcagattcttttcaataaaagttacaccaagtgtgcctgcctctccttccgtcttctccacctcttccatccctgctacctctgaggcggcaagaccaaaccctcctcttcatcttcctccacagcctactcagtgcaaagaccgtgaggatgaagacttttatgatgatccacttccacttaatgaatagtaaaatattttgtcttctgtatgattttcttaataacatttgtttttctgtagcttactttactgcaagaatatagtatgtaatacatataacatactgaatatgtgttaattgttatgggtaaggcttctggtcagcaataggctattagttaagttttgggggagtcaaaagatatttgcgggttttcgacttactttatttattcttttatcagcaataattaaatccaacacatatacttactcatttttattggttgatttggtggcctaaagtatgtttctctttttagattagtgttgataggttttgtgttttttgtagccagagtatctggagaagagctgtttgaaaatgtccccgttacgtgattctcttttcagaatgattcagtgtaggggggaggagccaagatggccgaataggaacagctccggtctacagctcccagcgtgagcaacgcagaagacgggtgatttctgcatttccatctgagctttgaagagagcagtggttctcccagcacgcagctggagatctgagaacgggcagactgcctcctcaagtgggtccctgacccctgacccccgagcagcctaactgggaggcaccccccagcaggggcacactgacacctcacacggcagggtattccaacagacctgcagctgagggacctgtctgttagaaggaaaactaacaaacagaaaggacatccacaccaaaaacccatctgtacatcaccatcatcaaagaccaaaagtagataaaaccacaaagatggggaaaaaacagaacagaaaaactggaaactctaaaacgcagagcgcctctcctcctccaaaggaacgcagttcctcaccagcaacggaacaaagctggatggagaatgattttgacgagctgagagaagaaggcttcagacgatcaaattactctgagctacgggaggacattcaaaccaaaggcaaagaagttgaaaactttgaaaaaaatttagaagaatatataactagaataaccaatacagagaagtgcttaaaggagctgatggagctgaaaaccaaggctcgagaactacgtgaagaatgcagaagcctcaggagccgatgcgatcaactggaagaaaggatatcagcaatggaagatgaaatgaatgaaatgaagcgagaagggaagtttagagaaaaaagaataaaaagaaatgagcaaagcctccaagaaatatgggactatgtgaaaagaccaaatctacgtctgattggtgtacctgaaagtgaggcggagaatggaaccaagttggaaaacactctgcaggatattatccaggagaacttccccaatctagcaaggcaggccaacgttcagattcaggaaatacagagaacgccacaaagatactcctcgagaagagcaactccaagacacataattgtcagattcaccaaagttgaaatgaaggaaaaaatgttaagggcagccagagagaaaggtcgggttaccctcaaagggaagcccatcagactaacagcggatctctcggcagaaaccctacaagccagaagagtgggggccaatattcaacattcttaaagaaaagaattttcaacccagaatttcatatccagccaaactaagcttcataagtgaaggagaaataaaatactttacagacaagcaaatgctgagagattttgtcaccaccaggcctgccctaaaagagctcctgaaggaagcgctaaacatggaaaggaacaaccggtaccacccgctgcaaaatcatgccaaaatgtaaagaccatcgagactaggaagaaactgcatcaactaacgagcaaaatcaccagctaacatcataatgacaggatcaaattcacacataacaatattaactttaaatgtaaatggactaaattctccaattaaaagacacagactggcaagttggataaagagtcaagacccatcagtgtgctgtattcaggaaacccatctcacgtgcagagacacacataggctcaaaataaaaggatggaggaagatctaccaagcaaatggaaaacaaaaaaaggcagggattgcaatcctagtctctgataaaacagactttaaaccaacaaagatcaaaagagacaaagaaggccattacataatggtaaagggatcaattcaacaagaggagctaactatcctaaatatatatgcacccaatacaggagcacccagattcataaagcaagtcctgagtgacctacaaagagacttagactcccacacattaataatgggagactttaacaccccactgtcaacattagacagatcaccgagacagaaagtcaacaaggatacccaggaattgaactcagctctgcaccaagcagacctaatagacatctacagaactctccaccccaaatcagcagaatatacatttttttcagcaccacaccacacctattccaaaattgaccacatagttggaagtaaagctctcctcagcaaatgtaaaagaacagaaattataacaaactatctctcagaccacagtgcaatcaaactagaactcaggattaagaatctcactcaaagccgctcaactacatggaaactgaacaacctgctcctgaatgactactgggtacataacgaaatgaaggcagaaataaagatgttctttgaaaccaacgagaacaaagacacaacataccagaatctctgggacgcattcaaagcagtgtgtagagggaaatttatagcactaaatgcccacaagagaaaggaggaaagatccaaaattgacaccctaacatcacaattaaaagaactagaaaagcaagagcaaacacattcaaaagctagcagaaggcaagaaataactaaaatcagagcagaactgaagtgaaatagagacacaaaaaacccttcaaaaagtcaatgaatccaggagctggttttttgaaaggatcaacaaaattgatagaccgctagcaagactaataaggaaaaaaagagagaagaatcaagtagacacaataaaaaatgataaaggggatatcaccaccgatcccacagaaatacaaactaccatcagagaatactacaaacacctctatgcaaataaactagaaaatctagaagaaatggatacattccttgacacatacactctcccaagactaaaccaggaagaagttgaatctctgaatagaccaataacaggagctgaaattgtggcaataatcaatagtttaccaaccaaaaagagtccaggaccagatggattcgcagccgaattctaccagaggtacaaggaggaactggtaccattccttctgaaactattccaatcaatagaaaaagagggaatcctccctaactcattttatgaggccagcatcattctgataccaaagccgggcagagacacaaccaaaaaagagaattttagaccaatatccttgatgaacattgatgcaaaaatcctcaataaaatactggcaaaccgaatccagtagcacatcaaaaagcttatccaccatgatcaagtgggcttcatccctgggatgcaaggctggttcaatatacgcaaatcaataaatgtaatccagcatataaacagagccaaagacaaaaaccacatgattatctcaatagatgcagaaaaagcctttgacaaaattcaacaacccttcatgctaaaaactctcaataaattaggtattgatgggaggtattttaaaataataagagctatctatgacaaacccacagccaatatcatactgaatgggcaaaaactggaagcattccctttgaaaactggcacaagacagggatgccctctctcaccactcctattcaacatagtgttggaagttctggccagggcaatcaggcaggagaaggaaataaagggtattcaattaggaaaagaggaagtcaaattgtccctgtttgcagacgacatgattgtttatctagaaaaccccatcgtctcagcccaaaatctccttaagctgataagcaacttcaaagtctcaggatacaaaatcaatgtacaaaaatcacaagcattcttatacaccaacaacagacaaacagagagccaaatcatgagtgaactcccattcacaattgcttcaaagagaataaaatacctaggaatccaacttacaagggatgtgaaggacctcttcaaggagaactacaaaccactgctcaaggaaataaaagaggacacaaacaaatggaagaacattccatgctcatgggtaggaagaatcaatatcgtgaaaatggccgtactacccaaggtaatttacagattcaatggcatccccataaagctaccaatgactttcttcacagaattggaaaaaactactttaaagttcatatggaaccaagaaagagcccgcatcgccaagtcaatcctaagccaaaagaacaaagctggagacatcacactacctgacttcaaactatactacaaggctacagtaaccaaaacagcatggtactggtaccaaaacagagatatagatcaatggaacagaacagagccctcagaaataacgccgcatacctacaactatctgatctttgacaaacctgagaaaaacaagcaatggggaaaggattccctatttaataaatggtgctgggaaaactggctagccatatgtagaaagctgaaactggatcccttccttacaccttatacaaaaatcaattcaagatggattaaagatttaaacgttagacctaaaaccataaaaaccctagaagaaaacctaggcattaccattcagtacataagcgtgggcaaggacttcatgtccaaaacaccaaaagcaatggcaacaaaagccaaaattgacaaatgggatctcataaaactaaagagcttctgcacagcaaaagaaactaccatcagagtgaacaggcaacctacaaaatgggagaaaattttcgcaacctactcatctgacaaagggctaatatccagaatctacaatgaactcaaacaaatttacaagaaaaagacaaacaaccccatcaaaaagtgggcgaaggacatgaacagacacttctcaaaagaagacatttatgcagccaaaaaacacatgaaaaaatgctcaccatcactggccatcagagaaatgcaaatcaaaaccactatgagatatcatctcacaccagttagaatggcaatcattaaaaagtcaggaaacaacaggtgctggagaggatgtggagaaataggaacacttttacactgttggtgggactgtaaactaggtcaaccattgtggaagtcagtgtggcgattcctcagggatctagaactagaaataccatttgacccagccatcccattactgggtatatacccaaatgactataaatcatgctgctataaagacacatgcacatgtatgtttattgtggcattattcacaatagcaaagacttggaaccaacccaaatgtccaacagtgatagactggattaagaaaatgtggcacatatacaccatggaatactatgcagccataaaaaatgatgagttcatgtcctttgtagggacatggatgaaattggaaatcatcattctcagtaaactatcgcaagaacaaaaaaccaaacaccgaatattctcactcataggtgggaattgaacaatgagatcacatggacacaggaaggggaatatcacactctggggactgtggtggggtggggggaggggggagggatagcattgggcgatatacctaatgctagatgacgagttagtgggtgcagcgcaccagcatggcacatgtatacatatgtaactaacgtgcacaatatgcacatgtaccctaaaacttaaagtattaaaaaaaaaaagattcagtgtagttgtagtgctagatatattatatggaattatcagcagtttaccagttggttctttattagtactcctgatgtcttaaacaaaaatgaataattgtttatcttttctcaaagtgtctcatctgttcagtaacaatcacagttttctccgacagtcttgcatattacttttttttaaagtgctttggtttgatatttctttcattcatttctcagaatagaacttaattcttccctcttccaaacatatgctttttaaatattgaatttcctcaaaatatttcatagttaacgcagccaatatcttagccatcttccccaataaatcaaaaacctctaccaaaagttacataaaattattcattgtcatttcagcattaggccatcttttaacctttgggtaattaatatcaaatttctacttggtcagcaatatctcccttttttcttccccattctcaacccctttcttgaacctcattcgataactgctgaatttcttttctttctaggattatacttgaaaggaaattgtgatttattcccattaaactttaaaaacattttggctttatttaagccaacatgattctatttggatttgctttctttttcactacagatcttaatcacttctgtttcttttatgccctgtgtttctacatttatttattttttctttattaatgcttaaattctttccctcctcagctccagcacccatttcccttccttttcttgcttcacaacccttctcctttggggaagttataagattagagtgagatgaccctcagctccactcactaggttacaggattcattattaatcctacagattagttttagtcatgtgagccatggtgattttggtctctttttcttttttggaaggtaggtggaagaaaagacttttgtgttgctctgaattgtgtggtgtgtgcctgtaagagctagaattagtatagtcgtttttctactctgatacaagctagtctgatgacagtgccacacacagacgaggagaaagttgaggagatctcagagaaatgaagcaggagccttgattaacctgtttatgaagctcattctacttccagactttacaatgatgtgatctctgagctgataaattcttctactggagtacagtacagtagtttctattacttccagtatatcctaactgatatatacaaattgtaacatttttttaaaaatctaaagtacagtaagcatattgttggtcagcctaaataacagagagaggctctcttaacagaaatgatatttaggaatagggcattgccatgggaatacatgtgccatgataaactatgcatgtttcagggaagtacaggaaaacaaaggtttttaatagaaaaaaatgagaaggattacataattgttttgagataattatccttggctacaaggatcacactggtctgaggttggacagacagttgctgggcagatgtctttccagaagtattttttgtgtaaggttgtgacagcctttgtgtaaggttgtagtttttgaagaatgttttgtgatagtttttgtcaggcatttattcatgagaaccctattttcatagcctttcctgactctgtttgttaggatttttttgtttttgtttttaacacgagtgactcttgatttcaacagctttaattttctcccttttgatcaagatctttctctgaaggcattgatgatcagtcttcctgtaattaggttttgattgtcccttggtgctgggatggactggtttggtcccacattggagagggtgattggtgaccaggaatcagtgttaaaatttttctagccacatttgagcaacaagggagattgaaggtgagtggttcttggtctaagcctatctggagaccatcattaagtttaattttctctgttttgtaggtgcttgctgtcatctcaaagtgctgagctagtattattttgttaggagttgtacttctgcaaaaatttaacaagtaacagatacaaagtttaagaaaggaaaatacaaagtaaaattcataataatatggcaatcccagtttgcataatggttttgagccatgaaacctagcgtaaagacaactaattaaataattccagtggccatagagaatttggtgagacctattgtaaccatgtggcctgttttcttattttatgtatatggggtctcaactttcccataggaatttatccagttacagcatgtggtattagcaatagcacaggcattttcttatttaaccagttgatacaaaaagatctcttaggtttcattctttcaaactaccagcagaagccactgattgttaaatttcagttatggcattctcctatcaagtgaaaaaaagtagcattgaggtgcgtaagagtcttactattatataaaagtcttgttccaacaccttgggaaaaaccgtctaccatgtaaaaatgtcacctccttgtcttggtttgcagtttgaatgtctctagttagggcatcgggtggtttggtgaactttccgtgtgattcgtacatcaggcccaggacttgttccttcagatccatctagtttcagtttataaagctttaggaaaatttaggattcgttctagtctacaggtagataagaactattttaaaacaatgcacagagctacaatctaataaggatgtgttttatagttttttttaataaacataactttctctgtatagtcatcgtgatttatttatttaattttttgagacagagtctctctctgttgcccaggctggagtgcactggtgcgatctgagctcactgcaacctccacgtcctgggttcaagtgattctccaagtcatcctgatttttatcaaagataatcagagtaagacaaacttgtttgtaaaataagttttatcaataattgcctgtaagaagtgatttgatcacacggtattcccagatttaaaaactcttaaggctgcaaagccaaaccaaggcagattttagattttacctacactcttaaggttcctgagcttgtgggaagtgacactttttactcactcactgtgaggctgggaacccttgaaaccaagcatcgtatgcacattctcaaatatgatatttcagtcaaagccttggtaacacaaccagtgtattttattgtatcttgatagaaaaacaatagatttttattgaacctttcagttaaccatattgccataagaatactcacaaataatttttgaattgggggggcagtcaaataaggagaaaatgcaactatttctacctttgttcataaaagtatactttattaaattgcctaaagagaaagtttccttaaatctggaaaacagaacatttaagtaaataactaatagtgtttcatataaaagtcatggaaacattatctttatcatttatttaatctcatctgttttatttttgcttcatcttaacagtcttttgaacccatcagtttattagtgttctagaaaaaaaagatttagtccattaatcttaaagttattagaaacctgcatttaaaaggacccattagggcaaggtgtggtggctcatgcctgtaatcccaacactttgggaggccaaggcaggcagatcacgaggtcagaagttcgagaccagcctggccaacatagtgaaacctcatctctactaaaaatacaaaaaattagctgggcatggtggcagacacctgtaatcccagctactcgggaggctgaggcaggagaatcacttgaacccaggaggcagaggttgcagtgagccaagatcatgccattgcattccagcccgggtgacagtgtgagactccatctcaaaaaaaaaaaaaaaaaaaaaaagtgcccattagggccttttctgttaatctgattgtaaatacttgttttttattccagtatttattgtgcacaagtgaccagatacatatatatttccttatattctcctcttttttttaaatttttttagtatttattgatcattcttgggtgtttctcggagagggggatttggcagggtcataggacaatagtggagagaaggtcagcagataaacatgtgaacaaaggtctctggttttcctaggcagcacatcctgcactgcccttaatccatttaaccctgagttgacacagcacatgtttcagaaagcacagggttggggataaggttatagattaacagcatcccaaggcagaagaatttttcttagtacagaacaaaatggagtctcctatgtctacttctttctacacagacacagtaacaatctgatctctctttcttttccccacatttcccccttttctattcgacaaaaccggtatcgtcatcatggcccgttctcaatgagctgttgggtacacctcccagacggggtggcggccgggcagaggggctcctcacttctcacacggggcggccgggcagaggcactcctcagttcccagatggggtcgcggccgggcagaggcactcctcacttcccagacggggtggcggctgggcagaggcgctcctcacctcccagacggggtggtggccgggtaaaggcgctcctcacctcccagacggggcggccggacagaggcgctcctcacatcccagacggggcggccgggcagaggcgctccccacatcccagacgatgggcggccgggcagagacgctcctcacttcctagacgggatgacggccgggaagaggcgctcctcacttcccagactgggtggctgggcagaggggctcctcacatcccagacgatgggcggccaggcagagacactcctcacttcctagatggggtggtggctgggaagaagcgctcctcacttcccagactgggtggccgggcagaggggctcctcacatcccagacgatgggcggccaggcagagatgctcctcacttcctagatgggctggcagctgggcagaggctgcaatctcagcactttgggaagccaaggcaggcggctgggaggtggaggttgtagcgagccgagatcacgccactgcactccagcctgggcaacattgagcactgagtgagcgagactccgtctgcaatcccagcacctcgggaggccaaggcgggcagatactcgaggtcaggagctggagaccagccccgccaacagggcaaaaccccgtctccaccaaaaaatacaaaaaccagtcaggcgtggcggcatgtgcctgcaatcccaggcactcggcaggctgaggcaggagaatcaggcagggaggttgcagtgagccgagatcacggcagtacagtccagcctcggcaacagagggagaccatggaaagcgggagacggagacgaaggagagggggagaccgtggaaagcgggagacagagaccacggagagggagagggagagagagagggagagggagagagagagggagagggagaaggtaaatacttttataaaaattcaaaacagtaactgtggatgtcagagacttaagagtggctatggttaaaaatccaatggaagtttattatcaacaattgacaagaaaatttagttatatttgtggcatatgacatattatctagaattctgactgattacattagatttctgcattttatataattttggaacattcattatctgtaacatacacatacatgtaactgaaagatctagtatcacctaccatttgacaatgtttcttattcaatttatccaataaccctaatcacttaatatctctacaagatgagagatacattctttgatgctctctaggagcccagtggggaaatcccaaagttaattctaggtcaaaaaatcttaatttagaattttgagcttgggaaagcctgccaaagatgtcaaaaggttcaaaacacttgaacaaaacagtagcacaggtcactgtgaaatcagtcttttttattattattatttattttaaccagagtaataatcaaaagacttcaaaagcaatacagaaagttacatggattttaaaaatcttaacccttacaaagctcagtttccccaaccaatcaaaaatctaataaagaccacatgaagttatcttgataaaatgcaaagtctttgtttctttggccagttaccaaaaaggtaaagagaatttttctgcagtgtaattgcttcttcttatggtaaacccatttagatagcctggaagttgaacctgatgaaaaaggtacttcaggttaatcagacaaaggagaagtgtgtctaaggttatgactctacaccttattatagaggaatgtaaacaataaaattagtaccttgagcaggggaacacgtggatcttagcagcagcctgagaaatttcctggttacatggaataattgagatacatcaggacaagacaagagtgcagaatcaagttttactaggaaacattgcttttctagtccttcaagacagaacatttcagtttcaggtcacaaaaacagagttagaactggagaaaaaaggaactgatgaaaaagttaaaaagagagagtcccagttattgtcccagctaaacaaaaagatgtatttttcaagaggagaaaggaggagagcagaaggcaatgatgcatgacctgcaaatcatgtgcagtgagacacagcagaatttaaacttctgagctatgaatatgagaagctttaagaggaaaactatacctcaagaaatgaaattaccattctaaatgaaaaagacagcatttccaacttgaaactagggaaattagatggaatctgttagaagatggctaagagattttagaattaaaaatcaaaatctcagtacttccaagaaaaccttgttctaacacaggggaccaaatttttagttttgtatcagtgtatttttagtatcaaagctcaatctttagaaagacttgtaaataattcccttctaattatagccaacttgatcacacacaatttctttcctaaattcatctttctcaaacctttcgtgagctgcatagacctttgacaacatgcttagactttttgttttgtcctatatgtcctctttcttaaataacgcaccatctttaggttgaaaatttaccacaagattctttctcatacaaaattattctctttttctttttaacctttcttaccaaaaatacaatttcatacctgtaatttttttaatatctctctttcctacttattttacttattggttccttttcttatttccttcttaaatcatattttgaaacaacctttaacctctgaattagacaaaatgattatctcaatagcgaatacatttttatgctttcatcgaaaacacatttttgtgtactttgtttacaaaattatatatattagaattttaattcttagtaacaatttttagtgaaaacataggaagcaagaaattttgaactgttcattgtatatcagtacttttatagatgagaatcattttgtaatttcagaaaatgtttccccataatttttatgttaaaaatagacccaaacatatttaggctttttataaaatttaagaagctaagagcaaacttacaattatgttcagcaatttatgttttaatgttttttaagaatcttaattggaaagacccagacatttaatgaatatctattacttaatttaacataacagtgggaatttagattgcctgaaaagttcatgggtaaacatttatcctgcctacatttacctggtttatctttaacaattatacctagattacttatgaaagttgagatactgggtaaaactagtcatcatttcaagttatttttcttttaaccatttatatagactgaatatcaggcattcacctaagtaagaaactaaaatatattggtattttgccaataactcagaacacacagctgtttttattaaactaaacagtgttacattagtcttaccaaagaattataccaacaaagattattctgttttaggttgggtttatagtgttatggccttaaaacatctagcagagacaaatataatcctgtctgaccagtaaacttaggcaaaaatgtatgctgataattttgaatacatttttattaagttttaaaaccagcttatttatcaaagtttttttaagtcacgtgaactaaaagacatttggcttaattactatgtatttcatgtaagcgctcatttatttaagccaatctgaatagaattccttaagggatttctggccaagtacatcagattttactatgtagacataacatacaacataaaatatgtgcatgtgcataaacacacctaagcatatatacatacacacaaaaattttggggtaaaactgtttctatagcagtttaaaaaaacaaaaaaaacctcttttacccttcccccacctttgactcagtttcacatgagtttagggttaaatattcaatgtttacatttttagctaggactggctgaattgtatgagaaaaacaaaatttctaagtggcattgaattttcggtaacaagtctatcttttgtttgccagtctgatttgcttgactagtcagcgtagcagggaaatcgtttagtgtgtttttggttttttgtttttcacccccgcatggcagaaaaaggaatttttatgctagacagagatactttatattgtttctttgagctcaagactttcaagtgtttgatctgagatcctaacttttgtgagcactatatagttctttttcttttagactatgaatccttcagttaactgtttctttaccctaagcaattgttagtcaggcaaacctaaatttacatttccaaaagatacttaagtcgttagttgtcatcgagctgttatactttgtaaagctattaatttgaaagtcctttaatacttttttttttttaatcttggctggaattccataagcagtgagttttatatcaacaccagtaggaaaatcagcagaatcaaagtaagcaaaaaaaaaaaaaaaaagagatggggaaggtagaaggctttacatgtcagcttaatatttgcaggttttttgtttttttaaaaagagagtttgaataatgactgtttgagctctggattttcctcgatatacttggtccatcagttaaaaaatgagaataggccataagatgtagcctgctgaagtcccctagaacctgacatgccttaatgtttgagaattccattccttttcttattaatctctcaaaagtacggaaaatcccataaattctgtcagggtatgtcaggactgttgttttaggtgctggtgactgtcctactggcttttaattaatcattctgtgtccatcaggctacaaggatcaataataagagtgaggccagtctcaggttggtcatgcagttgctgggcagatgtcctcactgaggttgtaagtttgtgatggtctttgtggtttttgcagtcttctgtgatagtttttgttatcagggatttatgcatgagaacactctcttcatgaccttttctggctctattagggttgtttgtttgtttgtttttaaacacaggtgactccattttgatttggacaactttcaaattgtatagaatgtggaaaatatgaaaaagttttttttttattttacaagtttgaattatttcacataaatgtagcttctttttaaaaaaacttatctttgaatgtttatcatattaaatattcttttaaaatgatattattaatgactatataatgttcttttagaatgctagaccgtagtgatagttgtcttttaagatgatactgtgagccacttcactctttcctttggccaagattaatgttgattttaagtgacttcttaccttttttttttttttaacttttctgtgtacctttctgttgttttattttcctgggaaagtggagtaaattttatatcatacttgtataaagtagtatttccttaaatagattccttggattactcattttcttagatgccctattaagaagtgacttacttgataaacagtgtatactcctattggctcacagtaaacattagcaaattgacgacttcaaaaaatcttgcagatgctaaatctctttatctttatttacttcatattttcccccagggtatctgacaatagaatggagatagatcttttgctgaaaatattttttcactatgttttattgtgtcctcattctcttagtctgcagtaagaaatctgtatttcttataggtaaatattcatatcttcagtaattcaacttcttggtgaacaatctagttatatactctgcttataccacagtcattaacacatttcctcatggtgtttacattctcaataaatatatcttattttttaaccatgtaactcttaaattttttagcaactgctttatgacctacttagtggtaattttaaagaaaatagtcaaactagcagatctccctgcttattctagtgatgatttccacacacataacttctcccactcccacatcctacattatccctggaattgaaatgagtacaagactatcaaaatcatttactgtaattttataaaatgagtctcacaacttagttttttagtgagatctgtttctgatggtgaatcacggtataaatgggtttttgttctgctatctttcttttcatgacttcatatatcctttttttaaactcttgcatttcatgttccttttgtttatttaagatcctcaatcagttttcttcactaggggaagaaagtgaaagaattcactttcttgtcgtcagtgaaagaattgccatttttttttattcccatccctgccacctccactgcaaacactttcattttcttttagaaacattaatttctcatttttctggcccttacattaagctacttatattcagcatatttctcttctgtgttttcattctgggttttttttgttttgttttgttttgtttttgttttttcttgaggcagagtctcgctttgttgcccaggctagagtgcagtggcatgatctcagctcactgcaaactctgcctcccaggttcaagcgattcttatgcctcagcctcccgagtagctgggattacaggcatccaccaccatgcccagctaatttttgtatttttagtagagatgaggtttcaccatgttggccaggcttgcctccaactcctggcctcaactgatccgcccaccttggcctcccaaagtgctgagattacaggtgtgagccactgcacccgtccttcagtctgtttcagcctgcttcattctttgtatatgcagttgcttttctctcatttaatcactgcctcagtttagctatcccaaaatactatacatctctttctcactcagttgtcttactttagttcttactcttgtaaaatgtgttaaataacaatatttttcacataatgatttggcaaatcaggtcaaaatatagtcatcaacatataacttctaaatgacagttgtagtaggaagagctttggagaagaaatcacaaaagctggtttcttattccttttccagtgtaatcttattatatggccttatttgtaatatgaagaacatgacctatcatccctatctcagatgactttttaaatgaagagattaatgtgtttgaaagagctttgaaatttttacaaatgctcttaataaaaaattaagacacagtgtttatggaagtcagataacattaaaaagattgaatagctttcagtcaggtaccttttaatgaggacagtgtgagtctaatgagtaggaattagctaaaatggtagggtgaggggggtggcatttcagagagggaacatcatgtgcagaaaggagttatgaaataagatgattagtatggattactataagtaatttagtatggctagagtgtaggatgtccatggaggagtatcaagagataggattaggaaatatggatgtgcttgaatgtttaatgaaaagatgtggaggattgcttaaaaatttaaaggaatgacataaactttgcattttcagaagtttattcttatactattgtagatgaaagatgcggacagggcaggggaggcaaaccggagttagggagacttgaggaggctattgcatttaacaagggtctgaactgagaacttgaagtaatatgaatgtagaaaggaaaaagatagatgcaaaagacaatagtgaaatggaatctatgggacctatgttctgattaaatgtgggggtaggaagctatttactaaaagagaaaattttataattattctagggcttctggcttaaatgggtttcctaccattcactgagttagagaccaaaatgaatttaaaggaaagagggtaaatttgattttgattttgttaaatttgaggtatttagcatatacccaagtgcaaatgctttgttttctgttgcataaaaggagagaggattggggacttgtctctttggtaattgaagccttgggtttagatcagatcacccaaagcagcatagggctaagtctctttgttacaccctatttttaaaatctaccccttgagaaatatacaattccccagaaaccttgatatccatggcccccctttgattcatatttgtggtccttaatcccaagtctgagccttcagtgaaaacctgtcttctcacaatctgccgtaaggatccctaggccactattttaccacttttttattgttctcataactctaagtaaaacttaaaatgttttttattactctaaagctatattaccaatctaatccaaatacacttttaacctaatagagtcttagtaatagcagtcattatttttatttttttaacttggagtttactataaattggtcaattgcttttcattagtttatcctcatgaaacctatatgataatataacatcataaattcagtttattgtagtagcatacctggaaattccctcttggtatttaactgtaaaggcaattattttaatatgtttacttggcagctttgtttggaacttgagcctttctcaagctataaccttaaattatgagttccctcccattctccttactccctcctttgtaatactttgtattgaccttgacgatttgtgtgagttgtgctttaaactctgctcatatgacattataggctggcttcttgatttactcttattccaagtttctctggcctgattgcccaattttccttttctttcctatatctggcagtgtcataactaagctgcctccttgctaccaggaggtcaggtggagtgaggacatagggcttcagggacagaatgagtgctggaagaacttcaggggctattgtgatggatatgactcctgcctcagctcacacagatactattttaaagtagcaattgcccgtcttatatgggtcctcaaaattcaaaaactgccagttgcctataatttgtaggcattctcaaacatttttgtcactgcacctagatgtgaaggaggagaaagatgttgaattgattcctgcaaacattaaaaaggagtgtagttaaaatgtcaatagtagtctggctacagatagtgaagagtctaccttttttttttaaacaagacttctgatcacagtgcatcgtttttgatttttttttttaacaagtagccattcatttggacatggaatcatcaacccctgactactccttagtgccattttaaaattgtttcaagggttttcacagatatctgagaacatcctcagttcacaggtcaatatacattttgagatacagtgtaatgccagtgcaaaaagtatatatgaaatgaagttaaaactttgtagtttatacaagctggaatagctattattaaaaagtcaaaaaataacaggtggtggtgaggttgcagagaaaagggaatgcttatacaatgctggtgggaatgtaaatagttcagccattgtggaaattagcttggccattttacaaagaacttaaaatagaactaccattctacccaacagttgtattattgggcatgtacccaaaggaatagaaatcattctacaagttggaatagctgttattaaaaagtcaaaaaataaaagatggtggtgaggttgcagagaaaagggaatgcttatacactgctggtgggaatgtaaatagttcagccattgtggaaattagcttggccattttacaaagaacttaaaacagaactaccattctacccaacaattgtattattggtcatgtacccaaaggaatagaaatcattctacgataaagacacacacatcgcagcactattcacagtaacaaagacatggaatcaacttaagcccatcgatggtatactggataaagaaaatgtggtatatatacaccatggaatactacatagtcataaaatgagtgagattatgtcctttgcagcaacatggatgaagctgtaggtcattatcctaagcaaactaacacagaaacaaaaatcaaagaccacacattctcacttaagtgggagctgccaggcatggtggctcacacctgtaatcccagcacttggggaagcacttaaggtagatcacttgaggcagatcacttgaggccagtagttcaagaccagcctggccaacatagcaaaaccccatctctactaaaaaatacaaaaattagctaggcattggggtgcacacctgtaatctcagctgcttgggaggctgaggcatgagaatcacttgaacccaagaggcagagtttgcagtgagctgagatcacaccacttcactccagcctagttgaaagagcaagactccgtctcaaaaaagaaaaaatatatattcacatatatgtatatatgtaaatatatatataaaaagtgggagctaaacattgagtacatatggatacaatgaagggaacagcagacactgggacctacttgaggagggagggtgggaggaagatgagtattgaaaaactacctatcgggtactatgcttattacctaagtgactaaataatctttacaccaaacccccatgacatgcaatttacctatataagaaacctacccatgtaccctaaacctaaaataaaagtttaaaaaataaaaaaatacactttgtagttatttattggacagtggtgtttgagtgataaagtacaaatttgttctttacttttttatgtcacagaaaaatggtagttcccagacgtttacattctaaacctatatagaaatctacatgctagcaggtaaaaataattcctgttagatttttctaaatcgtaaatcagatttatgtgaaaaaccaggttatgtttttcccttttatttctttgacaatagcagtgaaaatactattttcaaattctggattcctgtttagtacagctattctcccagttcactggatttaatctgtggaaagtgtcattggagtgcaagagttagcattgttttgttttgttttccccttgcccctgacattccactatgatattaagccactcttttagttacagttaaatgagacatgcatgggtgatttgcagttaactgctcgcctccacacataacaaatgcttcggcttcatatctaatcatgattcatgccttatgccagactcttgctgtcatcccagtaccagcagatggtggggctagacccctggggcagtatgacccagtgttctaaggttatatttcttctggtagcaatggtcagaaaaggaaagattttaacatggcaaattaagtttagttctttatggctttttgcttaaaaaaaaaaaaatcttaggtgtcacattttcacgtggttccttaaaaacttactttttagtccagtaaaataaactggagtgttatcattccttaactccaaatcctggtagtcaaggggtacaaggagcagtggtttttcactttcctcaaacccatgattggaaatacattttacatacagtacatatatacttacaggcacatatgcatatgcatatacataattcaaaccaaaatttcaatcataatgtttgaccttaccatgtgcaatatttttctcttcttttttgttgtagatgttgttaattcttttattttaaccagtttctagtcttcattccccaagtagattttagcgctcataatggattgggacccacagtttgaaaaactgtattaaacaatcagcacttattataaagaaatatgttacgtacttttttgtggactttctcaaattataaaaaatgattttcctcctctttactgatcacatcagctgccatttagttaacaagaaatttttagggttctctattatttgtatgtatatccaagaatctaaaggacatagaggagctacatatagaaacaaatttcaattgaatgttttaatgagccttataacctctagctttaaacacatgccatttctcttcattgttcacaaataataattttatttctttgagcttttctttatttttaacatattttaataggtcattctttcagtaacatacatgaagtagcttgtttttataggcccattatttgtattttaacaaggaaaggaaagaagtgggggcctcttgaatttctgtatcaccaaatagagttcagaatactatgggtttttgcagtgtactatttctcttcttcattaatggtgatgtgaatgagttgcatgaaaaacataggagtcataggaaccatgtaatcccttgactatcacttttcattccgtataaaatgataggaggtgagttttttgcctaattgccattttttaaagttgctatggcattatagggaaccatagagtttatataaagtgatagctcttagaattcagaagagatgtagaaaaaaagcatttatattctgaatagacagggttagaactaacattgagagtaagtttggtatgcaaatgatatattcagaaagaacttctttatagtctgactgtaaataaacaaaatattatattatcaagtgttttgtgccgattaaaactcaaaataaaagcagcttgtggagcagaaggtaattttgtataaagacatatatttgaatgtataccgaaactaatttctattatgggtgggaaaaattcttgaagaatttattgtagataatggttgtcagtgttagcattaaagattttcactgaagctctttgtatgtatctcttttagatacggaaacaagtgaaaaaatccaagcaagtggaatacttcagctgtttgcaagtctgttgactccacagtcttcctgcaaagccaaagtagctaacatcatagcagaagtagccaaaaatggtgaggtttacctcaagaacttttctgctgggaacgtcttcagttttacatcttacttgtcagtatgctttattaatttatgttttaattttgtagattagacattttttatttctatttatcttttgtttgactcttcatgtaattgttttaaatggctatagttacagtcattcatacctgtcccatctgataacccattccttctcagtagaattatgggaaagctctgctgccctcagctatacctgtgttatttattactttgggtataagattcttgaacttgccactgagtcattcatctttattgccataagagataatatatttttaaatatttatgtttgtttgtgttatacccacataaactcactgttcttttttagtttggcctattgttccgacattggcacttcaacagtatagttggaatatacgttctattttctacactcaccatatatttcttaagtttccatgtaagaatactctggaaaaacaataatgacaacaaagtttagattgtgtactatttatacactgagagattctttggatgaattatatcatagcataaatatttgcatgtggttttaattcagtccgtttgagaaaaacactgaattcctaaagcaatgtttaagcatataagaaggccgtactatatataatacctttagtttgcctcagtttgtcagttttacattattttttagccttttattgtagtatgtttcatatattattctttaaagtgaaggaatttgcgtaatcatcatggcaggtggctttgtaaagtaccagtatatgttggtttgggctggtaaaacaatgtatttttagatgtgttgccaaaaagaaaattgtttgaagctgtgtcatttgtgtagaggttctcaaaatgcatttcaagttccagttagattctatattggtatatgattttttggtggttgttagaaaattggccacttatcactcttatatgtcacatctaagaagcagatctagtttgaaaatgaattctttccagacattgcttgttaacctggaccaacccctatctgaattttcttagatacccagcatcttggtttttaagaacaagtcttttatttttaactttgttagagtcatagtatagatttccagaaatcaaggtagagactccacaatttttatcttaaaatcttttttcttaagcattcttatagtataaaatctgaaattttggataacagatttttgtgaaatggattgccattcctatattctcttacttaataatattcctcataatgctctgtcacaatttcatgacaactctgctttgaagagtttcttacagtaatactctagtagatgacagctatgttcgaaagacataatagaatttttaatgtttatacttttaatcagaggctgataaagggcatatcactaacctccactggttaaaataaataggatacattggtatggtgtttattactccatgaccacattacttttttaagtgattggctgagaaagtggaccagagtcttgttgagtgtttttgtttgtttgtttgtttttgagacagggtcttactgtgtcgcccaggctgaagtgtagtggcaggatcacggttcactgcagccttgacctcccagggtcaagcaatcctcctatctcagcctcctgagtagctggaccataggcatgtgccaccatgcctggctaatttttaaattattattattttttgtaaagacaaggtctccctatgttgcccaggcttgtctcgaactcctggattcaagggatcctcccgccttggcctcacaaagggctgggattacaggcatgagccactgattctggcctttgagtgttcttttcaaaagaaatacgtaacttcagaaatgcaacctgacacaacatagtacactgattgggcatatatttctttttagaaattgacgatgaaaaagattgtatgaaccagagaatatgaggttggaagttaatttgttcatctttactctgctgtgcacagaggagaaatattagcatatacttcttccattcaaataaaccccaaataggtttttgtacgcacaaaaagaatctttaaaaattaacacacctttgtgctgacattcaaaatttagaggatttgtaagaagttccgtgggcgagtttaatgtgggagggtagctttgaccataaattatagtaaaagattttttagaccttttaaatgtattattcccttatataatagacttaagactgatatgaggcaaaggacaaataagatatgacatatctgtgaatatttcagaattgggctctcaaagtatttaataataatagtaatacttcttaatgccagctatgattttgtgctaacataatttaagtgttgtgtacattatttcaatcccatatgagatagagttattttatacagataagaaaacatagaggctaaatatcttacctgtcatcacacttaagtgatgatagttggattttatgcactagtttgtttctctcctttcatttcttttcagtaaatgagaatttatgatggcagtggaatgtgtagaggtggtctgagtacagcggtagcagcatgtaacctgaaagattgggctggtaactgatgtgaaaatgtataaaaaccagcaaaagttgaactgctttatgtctgttcctctaaagtagttccctgcctttgacctgtagcagcaacagactcacccgggaacttgttacatgcaaattcttggatccactcacccagacttactgaatcagggactcaagagtgggcccaaccatctgttttaacaagtcctctaggtaatgctgatgagtataaagcttgagaaccacgtttcagtataaagcagtacagaatcagtacttttgattaacattatgctttttttgttcttctgtgtactttatcatattgcaaagtgtttatcaaaacttccgcctgagtgctcttaacaacaaaagagtgaaaatgtacacccaagaggacctggtgagagcattaaccagaaatacagaagtctcctgttctgttttatttattttaattttgccctctattccataacaggtacatgtagtacatgtttattttagtataaaatgcatgtgtgccctagaaaaatcattgaataaagttgagactccagaaaaatgcactatattgtcaggtagcttaaagtatacctcgagacctcagtgttggaagcttaacctccgtcattttgtaagaatgattatttattttttttttttttgagagggagtcgcccaggctggagtgcaatggtgcgatctcagctcactgcaagctccacctcccgggttcaagcaattctcctgcctcagccccctgagtaggtggaattacaggcacgtaccaccacacccggctaattttttgtatctttagtagagacggggtttcaccatgttagccaggctggtctcgaactcctgacctcgtgatctgcccaccttggtctcccaaagtgctgggattacaggcgtgagccactgcgcccggccagtactttctttaaaaacaagggcagtacaaagagtgagtgaaaaatataaatgtcagtttgacaacccacatataaaagtcactcattcttttatattcatgcctcatagttttccttgtttttcaaaagaaaaatataaaaagctaagagttaatacagggaagttattagagaaaattcaaacatgaatatgttatgatttagtctaataaacactgaggtggactctactactcagtgtttttatttggcttgaaaattttggtttaaaagagagttttaataaaatagtttcttcaggtaggtaaaagtggagaaagtagatgttaggttttttaatatttgaggatatgtgagggggatataaatcttggtgtatataaaaagaaaataattttcatcacagcctgtactttatgatgctgctgaaagaatatgtaattcaagtaggtttgagaaagtaaaagaaagaaagtaaagcgttaacactctaaatttacaaaagaataaaaaataatcgacaattatttaatgaatgtattactacagtcaaagggaaaaacattagtcttaggtggaaatcaactttttatttttattgatattgaaatagagcagtacctattccttaaacctctgtattgaatttctacattaacctatacatgttttgcaaagaaaaaaaagtgaattctatgttgtgtaggcaaatacacatatacagaaacacttaatggctcctgctttctacagcataatggcatccactaacgttgatttctattcactgtcattctgcatgtatcttggtttcagcctctttcccttgcagtactgcccctttccccgaaccaaaattttcagttctccgagttcaaattgcctagagagagaatctgattttttgcctgtttctttttaagttcatcgccattgttctttttaggaaatccttcaaagtagaccatcttttaggctattgagtcagaatccagccagctgtgaaagatagcaggtgtgaatgtagaggtataggtagtaggaacccctttgaagaaggacgactgtcagccattctgaagcctctccaacataatatgtataacattttaaacatattcttttttattattattattctttaagttctagggtacatgtgcacaacgtgcaggtttgttacatatgtacacatgtgccatgttggtgtgctgcacccattaactcgtcatttacattaggtatatctcctaatgctatccctcccccgtacccccaccccacaacaggccccggtgtgtgatgttccccttcctatgtcctagtgttctcattattcaattcccacctgtgagtgagaacatgtggtgtttgtttttttgtccctgtgatagtttgctgagaatgatggtttccaccttcatccatgtccctacaaaggacatgaactcattcgttttttatggctgcataatattccatggtgtatatgtgccacattttcttaatccagtctatcattgatgggcatttgggttggttccaagtttttgctattatgaatagtgccacagtaaacatacgtgtgcatgtgtctttatagcagcatgatttataatcctttgggtatatacccagtaatgggattgctgggtcaaatggtatttctagttctagatccttgaggaatcgccacactgtcttccacaatggttgaaccagtttacagtcccaccaacagtgtaaaagtgttcctatttctccacagccaatccagcacctgttgtttcctgactttttaatgatcactgttctaactggtgtgagattgtatctcattgtggttttgatttgcatttatctgatggccagtgatgatgagcattttttcatgtgtctgttggctgcataaatgttttctttggagaagtgtctgttcatatccttcgctcagtttttgatggggttgtttgtttttttcttgtaaatttgtttgagttctttgtggattctggatattagccgtttgtcagatgagtagattgcagaaattttctcccattctgtacgttgcctgttcactctgatggtagtttcttttgcaatgcagaagctctttagtttaattagatcccatttgtcaattttggtttttgttaccattgcttttggtgttttagacatgaagtccttgcccatgcctatgtcctgaatggtattgcctaggttttcttctagggtttttatggttttaggtctaacatttaagtctttaatccatcttgaatgaatttttgtataaggtgtaaggaagggatccagtttcagctttctacatatggctaaccagttttcccagcaccatttgttaaatagggaatcctttcctatttcttgtttttgtcaggtttgtcaaagatcagatggttgtaaatgtgtggtattatttctgaggcctctgttctgttccattggtctagctctctgttttggtaccagtaccatgctgttttggttactgtagccttgtagtatagtttgaagtcaggtagtgtgatgcctccagctttgttcttttggcttaggattgacttggcaatgtgggctcttttttggttccatatgaactttaaggtagttttttccaattctgtgaaggaagtcattggtagcttgatggggatggcattgaatctataaattactttgggcagtatggccattttcacgatactgattcgtcctatccacgagcatagaatgttcttccatttgtttgtgtcctcttttatttcgttgagcagtggtttgtaattctccttgaagaggtcattcacatcccttgtaagttggattcctaggtattttattctctttgaagcaattgtgaatgggagttcactcatgatttggctctctgtttgtctgttattggtgtataagaatgcttatgatttttgcacattttaaacagattcttaaacatccctgtttttttttttaatatatctgcctgaagcatgataactttatgtctttaaaattagctagcgaggactaccactctttgtttaaaaaagtaaattagctgaaaagcaaatgagttttagaagaaattcttttttactttatccagagactgacagtgactgaaagctgaggaatatattagctttgttttatctttatatgtttttgagtaaaaaatggttccaaagagttttgattccacaatttttctgtaattatttaccctctattattccaagaatacttgaagctattgattgtagagtccaaattttgaaagattggtatcatataggcaaaacataaaagaaacacagtaattcttcaatgttgccattgcctgaatagcaataacaaaacaagcaaaataataagataaacaagttttatttatgaatgagtacaaatcagaccgttcctaaatttcttgttttagtagtcaatgaaatcatcttactgttgggaaccaggcatagttcagtgaaaaggataatgaacatctgtgtttaatatgagttagtagcatgttaatttaagatttgaaatctagtccaggcctggtggttctcacctataatcctagcattttgggaggccacaatgggaggatcacttgagcctagaagttcgacaccagccagggcagcatagtgaaactctgtctataaaaaaataaaaaattggccgggcgtggtggctcacggctgtaatctcagcactttgggaggccaaggcaggtggatcacgaggtcaggagttcaagaccagcgtggccaacatagtgaatccccatctctactaaaaatacaaaaattagctggctgtggtggcacttgcctgtagtcccagctactcgggaggctgaggcagaagaatcatttgaacccagggggcagaggttgcagtgagccgagactgtgccattgcactccagcctgggtgacaaagcaaggctccgtctcaaaaataaatacataaataaaattatctaggcctggtggtacacacctgtagctccagctatgcaggaggctgaggtcagggaggatcccttaagctcaggagttcgaggctacagtgagccattatcatgccattacattccagtctgggtgatagggtgacaccttgtctcaagaagaaaaagatttgaaatctatgaagggtctaaagtaaccattaactaaagaggtagataagcagattgatgtgtcatctcctatagatggtcattgaattcatgaacatgtacagcataattcattttcttaacatgagtagtaggatacttagtactactgagtttgataacgtcaatgataagctcaaaggttagttgttgagataggaaataatctgagtcttagaagtttacattacaggggatttttagtggtagagtaataagtaagaaagagatgataggaattaattcatttatttcgggacagaggaatacctctgtgatttacagctatcttaggaggaaaagaagttgtctcagaggtgacagctgacagaataacctatatggtatgctctaagaatttgaaaatgaagggaaagagagggaggattgctcatgagggtacctgtggaacaaaccaaggggtagaccatcttgatagagtgaaaagatagtgatttttttagtaggacaggttatagatggataaattagttctttgttaactaactttattgaccagaacatccttatggtgagttgtgatgtccaaaaaggtaattcagttattggttattggagaaatttcatcagttacatacttccttatgttttgtagtggtccatcatgagacactgaaaaaaaaaaaaagtttatgtccaatcatgactgtggtggtatcatggtgagttaatacataaagaatggcataccataaaaataaggaaaaaatgggtttgaaatttaagaaatcttaagatttgactctttagacctgtaaatgtatgggtatagcagcagatatgagtgagccataaaatggattttaataaaggacaggagtgaagataagaagaggatgattccaccacatcttaccaatcaaaaaggacatattattttttaatggttcactgaaacctttatacatatgtatatacttatatttatatatatatttatatttataggcttttttagaaaacaaagtgaaaaattaggcaatatgatggcttagtttataactgtagtactttaattatcaggcttatagaaatacatcgccattgtttccatcatcacacatattgcttccaaagcatatcgttattacgagaagatagtgataaattagttgtgatgtaagttaattaaaatccctttggtttatggtagagactgtcagcaaacaaaaatatgaccccactcagttttgtgtattttatgaagcttttagtagggctgtaacagggtacttttgtacagaaatgtactcttcaaatattcagccaccttttcaaggtggcttttaaataccacatattaaaagtaggtatttattttattaggggagatgatttatgtaaattgtgaatcgttagatttttaattaaacatgtctcttattttcagagtttatgcgaattccatgtgtggatgctggattgatttcaccactggtgcagctgctaaatagcaaagaccaggaagtgctgcttcaaacgggcagggctctaggaaacatatgttacgatagccgtaagtgttgacatctcaataatacacatacatttttaagaattatgatattcagactaatctgcttttgtgttagcagtgacttttctaggctaaaacactaacatgggccggcatgattcagcactgcttatttagcagaatttatggagattcaggtcgttgtattcttatcaaagaaatcataggaaatgaaatgttttcctctgttatcacaaatgatattttcagaggaaattaagtcagtttctaagaaattggggctgtaagtttagaaaaaatacatatgtgcatcttctcaattaggtttcattgaaatattatctctgaatgggaatgcttatggacacagttttttaaagtttctgcgtctgtccaaatacatttttaattatttgcagttcggtaaaaccaatcataaaaaccattctcttctcaaaagctagattggcccattacatttgcattgactccattcctgtttgtcattatatcattgtcatcctcaccacattctataatatactgttctactaggcaaaaagaaagcaagaactggggtatgggtatattgtaacagcgttaacaatttctacttcccctttctacatataaacaaaatacagaaaagaattttaagtatatttagcttaactaggcttattctgattttccttagagttttatttgctgagccaaaacacgtattttatcattcacctgtaatgcctcctaggaatttagttttatttctataactaggataacttttagtgcttattttccccattgagtgtttaactcggatgagttatattttgttataacacaaaagatatggcccttttataataggcagtccttcaaaaagtgatttatgcatataagccagaaagaaaggacataaatatattcatttatgataaagaagtaggaaaaaagattgaaactatagttataactcatatatagcagtagtcgtaaagctagcctcatttattctccttttcttactttttctgaaataggagctacaatagccataagtattgaaatgtcagtaatgaatctgaggacatagatgtcttaatatgaattttaacttcagttttcagtccccagtatagcctgtaaatctgcttatctgctccttcaatccagttctttttatcatagggtattagctttatttacaaaattctgttgctttatgtttataattttgtgttttcatatttaggatttttattaagcaccatagtttataatatcaactttcaagactgaatcatttattatatatttatatgattaattttagcaacatatattagacctcagctgagtaatagtcaaaagattagtggcatgtacttggagagtactgattattactgtttttattcttacttttctgtgtttgttactggaatttaagggtaccaaaagtattcttttttttttttttttttgagacggagtctcgctctgtcgcccaggccggactgcggactgcagtggcgcaatctcggctcactgcaagctccgcttcccgggttcacgccattctcctgcctcagcctcccgagtagctgggactacaggcgcccgccaccgcgcccggctaattttttgtatttttagtagagacggggtttcaccttgttagccaggatggtctcgatctcctgacctcatgatccacccgcctcggcctcccaaagtgctgggattacaggcgtgagccaccgcgcccagcccaaaagtattctttaaaccttgttcattttagttgttcttgaattatacattgtttgaacatagagaatattacctgttttgagaacttttgtcctggagtttttcctattaataaaatagaaatacacacagtgatattttgtctcatattgccttggtttttatgggcatagagtaattttatttcctgtgtattctaaagaaccttgaagttagggtaataaatgtctagttaacaagattattcttttgatgaaactgaagtccattattatagtatttatcatatctatttatcttatgggatatacaatataaagttctatggatatcctttaagttatgaagttaatttttttcattttattatgaatatttataaccaacttatcctcatttagttcaatggaagtcatagctaaatgattaagcatagtaaatacagcccatatttttatacttttaaactttagttcaggaaaatgaagtttgaagtcttaaaagtgaataaatgtaagaagtgattcattacttaatataaatcatgtgatgaaaatgtatttattgtgccatgctttcatatgcatataatttccatagactgcatgctttcttacccttttattcaaaattaaattctgtcaacttctttgtgatttttctagaatgattgcaggacaattacagtgtttatacttgaattacaagaataatataaaagccttgtaaatgtgatgttgtgtggttgatttgggaatttacttgaaatgcatttctcattttattttctgacaactggaaatttttcctttttaaacaagtttttagtggcttctattttaattcatcaaccttcttcactctcgggaatgtaatgcttcatttttaaaaggagtatagaaaactacatgatagccttgtgatcaatacaaagaatcttcttctttcaaataaagtatgttctaaagagttcatatatttgtgttttatctaacttacctatggggctaatcagttgatttccattttattaatgtactccaaatgaataatttttttaacataggtttattcaggatgatagtaggcttacagtagatagtaaagttgatgtaaatagaaagtagtataaagacttcactattggatcacttctcggcctgttggctaagatcaagtgtagaattcactattggagataaaaatttgagaaattcatacatgttctatagatttttactttgacacatgaaaagtaaagcatttgctagcatatttcagttagcatagtgtatttgaaaggaggtgagctccaactgtagaaagaattaccataaaatccgtggaaatctttggagaaaaactaggtcagatttcagttttaccagccttgacagtgcccattttaggaacttttcctaatggaagaaaacggccttatataatcctgacatgaggtaacagactggcataccgctaaatgggacggagtaaagctttgttgctgatgaactttttgaatcccagtctccttcttgcatatagagatgaaagaatcactcactggctgggaacgtttttcatttaaaatgcttggtctcttttcttccagagagctgcaaggcacttcatttatgtatttctctttcgaagtatccgaacagacttctgatataagcaatattttaaaatgcttctgccctttaactttgccaaaataactctttttatgagaaatttgacatctttcagatcagagaagaaaggaaagttgtatttcaatttggaaagaaataatcaaaatatgtgcgattgatgggatacaccagggaatgtggttttaaagcgcagtagtattatatttcagaaatgcatgcctttggcctatttacacttccttttcaaaggttttataaaaaagaggattatgttcttatatagctgtctttgtggcattcctcattttattgatttgtttatataactgtacacattttaaattgctgatatacttaaatggccttatagttttaaaaagctttatgttaaattcccatcctgtatttataattcctggggataaattggtgatttgagactagtgttctgttttgtggatattactgcctgaggtcagaaaataattgttacttgatctactggttaaaagatattagtagaggctagaagaaaatgattacgtgaaattaaatatttgtgcctttttatacaccgaggaagaataatgtacaaatcaaataaaaatgttttaaaattaaacaaatatacctctttatagaaataaaatgtatgcttattatataactggtactattattggaaagatatgtacacttaagcttatatgatatgctatcatacataagataaaaagttgtattcttccttgctgatgagtaaatattaaaatgaggtagtaatcagtcttgccaaagccagtgtttatgaagtgaaatattgtttattcattgacatcaagtataaatgggaaggatgctgaaacatatgcatgtatccgtttgtatattggcgattcttgtgctacactattttaatataaagtctttatttttatgtaaaaattctttatataaaaatagtgtagaaggaattatagttcttactgcaaatactgaaaaatagttaccaataattgtacaatattttatcatgtaagttggtcagaaaagtatatattaatatgatacagacatactttgaaattgccaaagtaatcaaaatatatttgcaacagttatattcaaaagggaactatttatatccagcatttaaaataaatgtttatttcagtgataccaattaggttatttgatgagttatattaggtatgttattaaagtctcatgcaagtctttgtatttaccctattttctgtgttattcagttttagaataaaatagaattatcagtcagtaagtagcgtaaaaataagattcttcagttttcatcaatctgttgtattttatgagtttattattaaagtacatcatgtgtataagaataaacaacaatatgttactgctacttttagagatagtagttatgactattatcacatgaaagcattccactataaagacattctaaatatagattgaagtagatgttgttttgtaacactatcataagctctaaacacaagcatatgccattaaagagctttttaaatggtagagaaaataaaatgaacaaaggaacacaacctgaggacaattacagagcacacactaaatatgtttttttatcagaatgaaaattaataagaatattaactgtagctgttttttaagaaattaaccaaatagtgcattgcttagaaaagaatttgtttacaaattaatataattataaatgtataaaattttaatataacccctagaaagttggtattgcaaatgaatgtgatttccagctccaccattcactaagttgtcatttaatttttctgattttaatttcctccttggtaaagtaagcttgtgtggattaagtatgtttatataaaaagtgtgtgtgactcagtgtaatacatacaataacatacaaaaggtatttccataaagatataaaagccagaagccatataaagagaggcaaagataaatctggtgggaagcagggataatgtgcttaactgtgtataagcactgatttcacttgagcttcttggcagcctatgtgaaaaaacaacttgatatgccttgtaatttttattttatgataaaaaggaatattttagttctttaatcaaacaacttttgagacaaaatagtaggagggacttatcaggatgtcattaattccctagatgattctgtgcacatacctagttacaatatgtaaggatatttactggcattatagtgtacctagtgacggttctacaaaagttgcccagatgttttccatgtgattgtttcttgtactaatcttcaacagaatctgggaaataatactgaggactttacagaaggtagttttatttgggtagtatatcccgagtgtgttgttttttggtggttaaacttgcttaaaggattcagtttaaaaatttgaaaaagttttgacttgaatatatttcctagtttagtttaaaaccagaatacaattctggtttccattcattgtactttatccttttctctgtgttgtgtgatatatccaagttctatttcttgagaccaaaaaccatgtttatctctgatttttgagcccattatcagtttgatggaaacctgactagcatgaaagtgagtattttaaaataccactttagttgtggtacacaaatctgtacatatgttagaattgcttagaaccatacatgcccatacacatacactaatgcatgtaaaaactgatgaaatatgaataaggtctgacattgtaccaatgtcagtgtcctggttatgctattgtgtagtagagttatgcaatgttaccattggaggaggctggataaagggtacatgagacctttctgtgctttttttttttaaataacttcttgtgagcctctaattacttctaaataaaaagttttaaaacctcacctatccagaaagcatatatattctcttccctatgggaaatgaccttgttgtttcagcagtacctgaggtgggaggtgggggcagcaggcatacacataaaattttacagcatagctcacagcagtaattttaatgagtttgtgcaattaatgtgaaagacaaaaatgcctgtaattttttctccctccaaattggacttttatggaaaaaaatcaacaaaaacctaacagccctaaaataagatttacggagtgggaattcgtatttgttgggttaggacctagggacaaaagcagagtaaatttcctagaaagggaataactgatagggaaatattatagaccaaaaaaagtgaaattatgaactcaagtaaacaggttgatattaaaatgagaaaggacatttctgccatagagaataaaagacagaagataaatgaaagtataaaaaaacctttaagtagtaaagagggcactcaaaagtgtatttctgggtatagttctgtcttcccagtaaggtagatgtcaggctcatctgttaataaaagtcaacaccaaaatgatggtaggaagtttgtggttttgggggaaagttcaaaattggggctgtaggacatgtaaatcatgaagatacgattttttaaaatagccaaatagtaatataggtatgctatggtagagatcttgattgtgcatccattaatgtatagtgtgcttaaaatgtctataggctaaggaattattttgactttgatatgtggacaggaaggagcctctgaaagtaacttgaagaaattgatattttcagttttgtagcatcatatagtctaattggaatggacagagatgtgaggcagagatatcaggaagccattacaggaggccgggtgtggtgtggtaaatagtgactgcggcagagagaacgaaattatattgtaaagtgagagacagtactcagatagtttattatcagtttggctggtttttgcgtagcactgcaccaggtttatttaagcaatgtaaagtactctatctcttcagatagtttacactttgagaaactatgatctttccatttttgtacttggtattaaatttaaatccctcttttattaaatggtgtttggaaatccaagattctataaagtttaccttaaaattgtaggacaaagaacacatattactgcttttttccccatgcttgattactttccaaatactatgttataaaaagctaatgtcttagggaagacatgaaatagtaatttcgagtaattgttcttaattttatagatacgaaagtagaggcaacctgtgagagagtattgcacgtggcaaaaatattagatgatttttcttgggttcaataagaagtcatatatggttgccttcccccccaaccccacccccattctctgagtcagaagtctgaatggctttagaactttcctttcctcattaagaggacttaggtagggtgggaaaagtctaattatagaggcctacttgggggtttaaaaacattttttgtctaaatctgttttttccccttacctttaccactctcatttcacctgttaaagtcaaagtttagatatgtgaaacataagatttccagtctgcttattgaaaccctgtcaacacatattatcctctgctctttttaatagggttttgtttacatttttaaaattttcttatttgtaaccaagttgaagtactgagaactttctcaacttttaatcagccttttccttgctacaagtagggtgcattttccttggcggtgaggaaatatgaaaaataaatgctacgtaaaagtgaataattcagggccaggcatagtggctcacgcttgtaatcccatcattttgggagggcgaggcaggtggatcacttgaggtcaggagttcaagagcagtctggtcaacatggtgaaaccccatctctactttttaaaaagaaaacaaaacaaaacaaaactagccaggcatggtggcatatacctgtaattccagctttgggaggctggggcatgagaattgcttgaacccaggaggcagtgatttaagatcacagcactgtactccagcctaggtgacggagtgagactctgtctcaaaaaaaaaaaaaaaaagagtgaataatttacatttttcctgctgagtaaaatgtttttacccgttgagaaactatgctgtcatcagttcagattaaattctaaataactatatatgcatttgctctcacacacacacatatatatatacatatatatatagtctagcataatttaagtatgaaatagtttggtacaaaaacaccttttatatttaaaatatttataaaacgttttgatcttgaacaattggagtaataaattggaacaataaattacatacattattatctaaatgctatgtaaaagtaacttttatggaaataattgagttaaatgactttataatttgtgtataaagatattcagtcttttgctaataaaatgatacagaaatataaaaatatagggagtaaagaaagctttagtaatttctttaggaaatgtattgccatttatggagcctttattagataaagggtttttgaaaaagtagaattattgaacaattttaactaatgtgagaaatctgttggacaacagaaattaatactagtatcagcaggcacaccaaaaactgtgtccatcaaatgctgggccataacctcattttatgctgtgcccttggtactagtgctttgggaaatgaaagatttaattcatttacttttcctgatctggcattacaagtgtaaatgtatatacaccttgaaattttcccacctaaatgcagatttttaaacctgaatataatgtcacaaaattgcaaattgcatgcttctcttttgatatgtgtgcacttaacagtcatggtggctttttcttcatgactcatttttgtgattttacttatgtaatatgttatagcttttgcttttatatctagtctttcagggattttgcctgaatctggaaggtgaataaattgcgttttgagttttagaaacgatattcatgagcttttttatttgaatgctgaaaacattcgattatgtctaaggtacataatagaaattcactgttggcaaaattatagggggaaatgtaagcattagaatttaattttctttcctagtagacttcataaatacattttaactttatcttgaaaaacaatgtagggtctgcatgtggtggctcacagctgtgatcctaacattttcagaggctaaggtgagaggatcacttgagcccaggagtgcaagattagcctgggcgtcatagcaagatcgcatctctacaaaaaataaatttagctgtgcatgatggagcacttctgtagtcctgctactcaggaggctgaggtaggatgacacgagcctgggagttcaaggctgcagggagacatgattgtgctaccacactccagcctgggtgacagagcaagaccttgtctgaaaacagacaacaactaacacaatgtaggtatgtctattaccatttccctgctccaggaaattaaaatagaacttggcaaaattaaaagcagtatatttaataggaatgggaaaaaaaaagccttcataatcatgcagatcagaatggccagtatttcagacttagaaaaatacgttgctgctcatgatttacatccctgacttctaatctctttgagtgtgaaaacttcctttttaacaccacaaattattgttctctccctttgaggatataggtcacatatttttatagtaatgattgtacttacaaaatgtatgtactgagaagatatgaaataatgagtaaatgccaggaaattctcactctatgtctttgtattctttggtgtatacatactacaattaaatccacacatattgattgaaccaactatgtttaggggacactgcctgtgatggggattataggggaaagaatgagcaagaagtctctatccttgtgaggctttcacaggaggaggtagataataaacaagtaaatactacagaaaagatatttatagattgtgatgactgacatcaagggaataaagaaggtgatgtataataatggagtgtatttgagggtgaagaaagttctctctgtggatgttatttaagctgaggtctggaaaatgagaatgagccagctaagagaagaggaagaatattccttatagaagtagagtaattgagctaagtgtggtggctcacatctgtaatcccagaattttgggatggcaaggctcaagggctgcttgaggccaggagtttgagaccagcctgggcaacacagcaagactctgtctctacaaaataaaaaatgagccattatggtggcacgtgtctgtaatcccagctactctggaggctgaggtgggaggatcacttgagcccaggagttctaggctgcagtgagccatcacaccacagcactccagcctaaataacagtgagaccctgtctcaaaaaaaaaaaaaaaaaaaaaaaaaaagtgtagtaattgtaaagccctgagagggcaagggatttggtagaaattcagaaaggaaaccaggttatgcaagatactgtgaacagggagtattgtgtgataaagttcaagaaacaaacaaaagtgttgatgatagaaagcctcatgaatcatcttgaagtagtgagaagttgttgaaggcaagaagtgacatgatctgatttggattctaaaaacatcactcttggagctgcatggaaaaggagttgagaagcatggaaattaagagttaagaagggaagcattgagactaattgaaagacttttgtgattgtccagtcacaacataatggtaacttggattaagttatggtagtgtggaaggaggaggaacttagaaagtatttggagtgatggattggattgggaaagtgcgaaagggagaaatcaagagtgatttctaggacttgagtacctggacagaagatggggcaatttgccgatgtaggaaagaacagaggttgttttttgtttctgggtttttccgtcattgctgcttgtttttattttgttttgctgcaggcattattaagtctgagattcttcatagagacacaagaagaaatggcacataggcgatttctatatctttatattcttttacctttggggaataaatattcaaaaagttaaaataatctcctgcatttagcaaaatgttgttaactgtttcttagatggaatatgtagattcagggaaccaagagaaattagaaagcttaagtgaataaaactaccttgaaatcatagttttttacgtaggagggaatttaaaagtcatctcagccacccctgccaaattttacagataaaaaaactgagacctgaaaattcaagtgacttatcagaatcaacagctaaattggtgatagtgttgatctgaaaaccagatctcaggttcattgtttccgtaaatatatctgaggaagttatcactgtcaaatacataaatgcactgtcattaaatacatttatgcttcagtgtgaataattctgagcacgcaggttttggaatatgttttaaggattttactaaaagctgttcttaagccaacattttgtttaatttgtttaaagaacacaaaaataaaatttacctaattgaaagaacatagagtagaaccaagtgatggaggaaaaactttttacatttttccaagtataaaagctttatttaaaaaaaaaaaagtatgatgtgagggctgggtgcagtggctcacacctgtaatcccagcattttggggaggctaaggctggaggatcactggagtccaggagttcaagacccaccagagcaacatagggagatcccatctctacaaaaaagtaaaagaattagcctggcgtggtggcacacacctgtaatcccagctactccagaggctgagacttgagcccagaaagtcaaggctgcagtgaactctgatcaggccactgcattccagcctgggtgacagagcaagaagaccctgtctcaaaaaaagaaaaaaaaagtatgtatgtgaataaacattctttattatatttgatttattcttgacattttctctgtagagaagtgtgtgaaatactgacttcccttttaaactcattgggaataaaggatgttcagatttgattggattcttagtaatacctaaggaaacccaattaaaaatttgagagtttgactcttcccagtaaaccagctagacaaatacaggtatgttcttcaagtttgcagacaagtatctattgctttgtattgttttctttacacacaaggtgtataaagaaaaattaaaattgagccaggcatcatggctcacacctgtaatcccagcactttgggaggctgaggtgagcagatcctttgagctcaggagtttgaaaccagcctgggcaacatggcggaaccccctatcccctctctacaaaaaagtgcaataattggcctgttgtggtggcatgcacctatagaccctgctacttgggaggctgatgtgggaggatcgcttgagcctgggagatcgaggctgcagtgagtggagattgtgccactgcattccagcctgggcaacagagcaagaccctgtctcaaaaaaataaaataatactgtccttctaattgttctgaataaattcactttttcctgcaataatgatataaggaatttatacacatctaactttttttaaatgttactttttatcacttttgttcgatttttactgattgttaatatacccttttaaatatctctattggcacagcaaagtaagcttttcagtttagtagctctctaacaaaatattttctaattctgtgctttaagtgaaataaaacggggatgaaagtggcaaaaccatattatcatgtccatgagcagccaaaaagaagtctttagtgaccagagaaaccttaacgtaaacagtaagaagcaagtaataggacagaaacaaacagattctttactcagaatgtttgtcatttgaagtaaatacaagtggtggttctctttctctcactctcttttcaacataatatgggtgagttaataagtatttaatatatatgtgatatggtttggctacatcctcacccaaatctcatcttgaattcccatgtattgtgggagggacccagtgggaggtaattgaatcatgggggcaggtctttcccatgctattttcgtgatagtaagtctcatgagatctgatggttattataagggggagttttcgtgcacaagctctctttgcctgctgccatccattgaagacatgacttgcttctccttgcctttgaagccatgattgtgaggctttcccaaccacgtggaactgtaagtccaattacacctctttcttttgtaaattgctcagtcttgggtatgtctttatcagcagcatgaaaacaaactaatacagtaaattggtaccaggagtggggcactgctgaaaagatacccgaaaatgtggaagcgactttggaactgggtagtaggaagagattggagcagtttagagggctcagaagaagacaggaaaatgtaggcaagtttagacccctacaggcttgaatggctttgcccaaaatgctgatagtgatatggacaataaagtgcaggctgaggtggtctcagatagaaatgaaaaacttgttggaaactggagcaaaggtgattcttgttatgttttagcaaagagactggcagcattttgcccctgccctagagatttgtggaactttggacttgagagagatgatttaaggtatctggcagaagaaatttctaagcagcaaagcattcaagaggtgacttgggtgctgttaaaagcattcagttttaaaaggaaaacagagcataaaagtttggaaatatgcagcctgactatgtgacagaaaagaaaattctatttttctgaggagaatttcaagccatctgcagaaatctgcgtaaggaggaaccgaatgttaatccccaagacagtggggaaaacgtctccagagcatgtcagaggtcttcacagcagcccctcccatcacaggcctggaggcctaggaagaaaagatggttttgtgggccgggcctagggcctgcctactctgtgcagcctaggaacttagtactctgccttccagccactccagctatggtgagcaggggccaaggtacagctcaggctgtggcttcagagggtggaagccccaagccttggcagcttctatgtggtgttgatcctgcgagtgcacagaagtcaagaattgagtttgggaacctccacctacattgcaggaaatgtatggaaacacctggttggccaggcagaagtttgcttcaggggtgggaccctcatggagaacctctgctaaggcagtgcagaagggaaatgtggggttggacccccgcacagagtccctactggggcatcacataatggagctgtgagaagagggccaccatcctccagaccccaggacggtagatccatcaacagcttgcaccaggcacctggaaaagctgcagacactcaacaccagcccatgaaagtaaccaggatgggggctataccctgcaaacaagagggcagagctgcccaagaccatgggaacctacctcttgcatcagcgtgacttggatgtgagacatggagtcaaaagagatcattttgaagctttaagatttgactgccctgctggatttcagacttgcatgcagcctgtagctcctttgttttggccagtgcctcccatttggaatggttgtgtttatccaatgcctatagccccattgtatctaggaagtaactaacttgcttttgattttacaggttcataggcagaagggatttgctttgtctcacatgagactttggactgtggacttttgagttaatgctgaaataagaatttgggggaatgttgggaaggcatgattggttttgaaatgtgaggacatgagatttgggaggggccgggggtggaatgatatgatttggctgtgtccccacccaaatctcatttttaattcccatgtattgtgggagggacccagtgggagataattgaatcatgggggcagatctttcctgtgctgttctcatgatagtaagtctcatgagatctgatagttactgtaagggggagttttcctgcacaagctctgtttgcctgctgccatccatgtaagatgtgacttgctcctccttgccttctgccatgattgtgaggcttcccctgccatgcggaactataagaccaattaaacctcttccttttgtaaattgcctagtcttgtgtatgtctttatcagcagcgtgaaaacaaactaatactgtatgtattacctcatcttggttaactgagatccatattatgcactgctttttaataaaaagagaaaggaatggagatatgccagattatttgttttgagttggtatatatttcaggaagtcataaataaatgagaatgatgagcagttttcttaaaggtgactttatgttaaaattgattgactaacaaccaagcctccaggtaaaatatttaattttttatgagtgagatcaattgcattatttttacatgaagatctatatttaacaatccttatttcctttagccttgaacttttttcatcattttatgatttgtatgattatgttattattaaattaattagaaaagttatacatttaaaatttgtttcatagaatagggcttattcttttctgtagctctgttgattttggagaaggagaagccctatatttacctatataaatcagctaaagttccacttcagtttgatatgcatgtactgaagtcctcttattcactcaggaatacattcattcttttaagaatttttcatttttacagtttattagtctgtttcacatgctagtcaagacatacccaagtctgggtaatttataaagaaaaagaagtttaatggactcacagtttcacatgactgggaaggtctcacaatcatggtgaaaggtgaaggaggagtaaaggcttacatggtggcaggcaagagagcttgtgcaggggaactgccctttataaaaccatctgatctcatgagactcattcactgtcacaagaacagcataggaaaaacaatccgccatgattcagttacctccaactgagtccctcccatgacacgtggggattgtgggagctataattcaagatgagatttgggtggggacacagccagaccatatcatacagtatatgaaaacttcttaaatataatgtttcagtggctcatcattcttttaatgcttaataaccatatactcacaaatacacacctatgatatgatctagctgttttattcctagatacttgcccaaagacttatgcgtgaatgttcaatgcagcattattcacagtagcctaaaactagaaacaacccaatgtcaatcagtatatttgagtggataaaagatatagcggtatatccaaacaatggaatactatttagcaatgaaaaaatacttctatacatgatgacatggatgaatctcaaaatcattagagtgaaaatagacacataaaagaatacttactgcatgaagccatttctataaaatgcaaagtaatctatactgacagaaaacagtggttacctgggaccagaggtggagggaaagatggcttacgaaaggacttgaggattcttttggttgtgatgaaaatgctcagtatgttgattgtggtgatggttgctaaggtatgtagagctgtcagcactcatcagttaaacacactttaaatctgtgtagtttattttacctacatttttccttaatagagctaataaggaagggaatccaattagaatctaaacaaaaaggtacacaatttttgtttctttttatatacatgttaaattgcagtaagggcttgaaagacgttctggaaaacatggctatgaatctctttctgactcctccaggtaaaagtaatttccttatttgtgcttccattttactctgaacacttaattttgtttgctgcttaaattatatgttttccctcacacttccctctttttcccctcacccaagtaaaactgtgaattatctgtctttgtattctcaggacctagttcaatgtatgaaacatagtgagcattcagaaaagtgataaaggagggagagaatgctaatttagttgcagattttgagatatattgatgaaactgactgtgtaatacatttcattaatcagtatttaaaataaggaaattttactcctattaagtaggatttaacttaggttataagtgaactagagaaaacatgttaatgttaccatgtaaatctacctattgtggattcattatttatagatattaggtgaatgtattcatgtttattatgaacattttattcctttttattcctgtgcagttttatataaacctcctttctccttttttctccagtcattcctccaaaagaggtatattctcttctctatgcttctgtaacacaccataaaaaaattgcattaaagctttttttttttttttaacagagtctcgctctgtcaccctggctggagtgcagtggcgcgatctctgctcccagctcattgcaacttccacctcctgggttcaagcgattctcctgcctcagcctcccgagtagctgggactacaggcgcgtgccaacacacctggctaatttttgtatttttagtagagatggggttttgccatgttggccaggctggtctcgaactcctgacctcaggtaatccacctgccccagcctcccaaagtgctgggattacaggtgtgagccatcgcgcccagctgtattgaggcttttattctgtttactactctgtcttcctcattggaatagaaactctttgaaagcaaagtcttgtgttgctgtttgtgtctactgtacctgacacaaagcctaagttaaaacttaataagcatctgttctgtgattgtgaatgtgtggatttatccctagttttatcagtttttgttttatatattctgaagctctgtttgtaggcatttatacatcatttaggattgttatatctttttttttttttttttgagacgaagtctctctgtcacacaggctggagtgcaggagcaggatctcggcttactgcaggcttcatctcccgggttcaagtgattctcctgcctcagcctcctgagtagctaggattacaggcgtgtaccaccatccccagctaatttttttttgtatttttagtagaggcaggatttcaccttgtcgggccaggctggtcttgaactcctgacttcaaatgatccacctcagcctccccaaatcctgggattccaggtgtaggattgttgtatcttcttgttgaattaacccttttgttgttatgtaatgtccccctttatccctgataatactgcttattttttatgttttatttttttagatggagtcttgctctgttgcccaggctggagtgcagtggtgcgatcttggctcactgcaacctctacctcccaggtttaagtgattttcatgcctcagcctcccgagtagctgggattatagacacacgccaccatgcctggctagtttttgtatttttagtagagatgagatttcactgtgttggccaggctggtctcaaactcccgccttggcttcccaaagtgctgggattacaggtacgagcctccgcccctggccaataccgctttttctgatgtctactatgtctgacaatgtagacacaccagttttcctttgatcagtgtttgcatggtatatcttttaccaaccttttaatattatttaatattcttaaagtgggttaattatagacagcatggttgggtcttgcttttttacccaatctgaccatctctcccttttaagtgacatttagattatatgtatttaatatgatctttctgtggttggcttcaaatctaccatcttcctagttgtttctttttttctcccacaaaggcgggtttatttccgaacctagttgttttctgattgtctgaactgttctttgttcctctttccctctttgtccgcctttttttggattcttcacatttagctccattactggcttcttgtgtttttttattgtttgtttttgaggtggagtcttgctctgccacccaggttagcgtgctgtggcgcgatctcggctcactgcaacctccgcctcctaggttcaagcaattcttctgcctcagcatcatgaatagctgggactataggtgcacgccaccatgcccagctaatttttgtatgttttttaaatagagatggggtttcaccatgttggccaggctgacctcgaactcctgacctgaagtgatctgcctgccttggcctgccaaagtgctgagattacagacatgagccctcgtgcccagcccattactggcttctgatgccactttgtaagtttttagtggttgccctgtggcttgcaatatttattcttagcttatcacagtttatcttcaaatattatgtcacattaatttaatcaatcaccttactgtacagttccacttcctcccttaaatcttttatgcttctgttttctatttcatttttacatatgttagaaatcccaaatatattgatgttatttttacttaaaaatttgagacacggtcttgctgtgttgcccaggctggtgtgtagtagtgcaatcatggctcactgtaaccttgaactcctaggctcaggtgattctcttaccgcagcctcctgagtagctaggactacaagtgcatgccacaatgcctggctaatttctttttttccttttgagtagagacaggttctcactgtgttgcccaggctgatctcaacctcctggccacaagagaccttcctgccttggcctcccaaagtgctgagattataggcgtgagccactgtacctggcctgtttttactttagacagtcaattatcttttaaaaataggagaaaaactgtcttaacatacttttatcattttcagtgcactacattctttgggtagatccaaatttttgtctagtatacctctaactgaaaaacttttactaacattttttgcataacaggtttattgcaatgaattatctcttttatttgcttgaaacaattttacttaaccttacttactggaagatattttcactgggtgtagaattctaggttggactttaaagatgttacttcattgtcttctagcttgcatagtttttgatgagaagtctgctttatttcttattttttctgtttttttcccccttccggctgcctttaagagattctctctctttccctctctctccctccctccctctccctctctctccctccctccctcttgtttgtttttcaacagcttgggtatgataggtctaggtatgtttaattgttttcctttgcttggggttctctaagctttaatagatttgtagcatgatggctttcatttttggaaaatttttcagtcattaactcttaaaatatttttctaccctgttctctagcacttcattctctgagattccaggtacagtagtgcccccttatccacaagggatacattctgagaccctcagtggacacttgaaaccaaaggtagtaccaaacctgtatatatcatgtctttttaaatatattttcacacctgtaataaagttaaaccatgaattaggcatggtaagagattaatacaataactaatagaacagttatagccatatgtcagcatcactgctcttacactttgaggccattaagtaaaataagcattacttgaacacaagcactgcgataccgtgacagctgatctgacagttacttaagtgactaatgggcaggtagtgtatctagcatgaatacaccgggcaaagagggagttcatgatttgaatgggatggtgtaaaattttatgttactcagaacagcgtgcaatttaaaactttattttttttatttctggaattttttttattattttcatgctaccattgaccatgggtaacaaactgcagaaagtaaaaccatggatgaagggggactactgactactgtacacttaggttagaccatttgctattttctttccttcagctcttgggtgctctgggttatcccactcccacttgtttagtttgttcatgttttagtttgtgtaatttctattgatctatgagttcgctgagtcttttcttggtttgttgagtctgctattcagcctgttgaaataattctttgtgttgctcctttctagcatttccatttaactctttcttacagtctccattttctccaaaatttcacatctattcatggatattattcagtttttccactagatcctgtaacgtagtcattatcgttaaagtccctgtatgatagttttaacatctggatcacctgtgagttttgttggtttcatcttttgacagtgagtaatttttttcttaaaatgcatctcaactttttattgcagctggatattattgtaggaaaacagattaacagtatttaatctctggaattgagcgcacttccttttaatttagggtgttcgcatagggtagaggtcaagccagtctagtcaggagtcgaactaggttcatgttttgttgttgctcaccttacttgagtgcagtatgttcttcaaattcctttagtagtcggccgttcttactttatgcttagagtatgggtgctggaggactttccttagtgttcttgctttgacttcaggcttggacccgttcccgcacagctgtgggctttttctgtgctcttgctcctctcccagtggtaaattgttgttaacaaggaacattcctattacagttagcctgtagagcaaaatcccatttctaaacaatactcacacacacaaaaaagaaacttaaatatttcacagtgttgtattatattctattatatggagtggtgtgttagtttcctagggctgctgtaacaaagtaccacaaactagttggcttaaaataagagaagtttattgtttcacagttccagagatttttaagtctgaaatcaaggtgctcaccagggcatgcctctctctgaaacctgtaggggaggaggacatttttgcctctttgtagcttctggtggtcccaggtgttctttggcttatggtagcataattctaatccctgcctctgtcttcacatggcattctcctctgtgcatccccctcctcttataaggatacaagtcatattggattaaaaatctgccctactccagtaggacctcaccttaactaattatatctacaatgaccctgtgtccaaataaggtcacattctgaagtgctagggattagaacttaaacatagattgaaggagggcacacaatttaacccatgataagtagaaatgacatttatgtctcaaaaacattactcatatcagtaacattatctcctatagaaaaagatactaaaccacagaatattaaaagccaggctaagaatacactaacatattagaaagatttttgatacttgcttccttttcaattcagataaatttaaagatgcaagtgacagtttttaaaaatcacattttaatatgaaatgtacaaagtccaacgtatgtgtgtgtgtcactctcacaatcatccatcctcaaggtgaatagtaatttatcaatatctgtcaaaaggccccattcattaaaaaattcttgagtacctactatatactaggcatttgccatacacaaggaggaaacgtagtaaaatccaaagttaggatgcactgtacgacatgccacaatagttagattcagtggctgtattttaggtcttttcctcacccttagtgtataacttgtacctgataatagtgtttaacttgataacattttttttttctcatttgtgagacatgataaccatgacacaaattttattgctgcttgcttttgattacagaagggtaatggaagtgcagtaactctttagatttaaagccctgctcttagctaatgtgaagaatgatcatacttgtgctggaaactgctttgtgtgaaagatcatcattaaaggatttaataggactttaaagagtgggctgcactttttccagtggttggatgcttcataattaaatgaggaaaattgagatgtaaattatatttttagaagtgacagctcaggatgcttcataggttagctgttacttatgagaagagtgaaagatgagcttacacttagggatacacaagtttaggatagggaaccttttgagaattatttttaagtgaacaataatactcattatgataatgtaacatgaaggtatagagttaactatggaaaaccaatttatatggacttgtgcaatgatagctgttgtatttaaaatgatttgttttctaaatactactggaaaaataagtcagttgtaagatacttctaaagatgacttatgtcactggttttgctaaaggaacacattattatcatttattcctttgaatccttaaattctattaaatatttttaaaaaaatgcttttactgtgtttctcaggctgacttgtccaaagaaagaaaaaagctgtataatcaatcattcctatagtggtggttaatattttttgaacccagatcactattattgtaatacatgctttgcttttcttctcatatttggtaataatgtaatttctagtatacagattgtgtttatgccttgcaaacaattctcaataacacatgagcaaaaagctgtgttatagacaattcagaggaggggggtggaaggagaggaggagaagaaaagcactgtggctctgaaacacaaataggtaatttgcttttaattgtattgtgtttttattgcatcaaatttgttgaataagtttgtattttaatttattgaattatggaatttttgaacatttactagcttagtgtggataagaagccagctttcattcacagttcattgcaaataggtgccacatagtttctaagccctagtttcctagtatatgaaattcctaatatatgaatacaaggcttagtttagctattctctaagatgtcttcttctaagtaagtcctaagcatacatgatttatatttcaaaagcccagtttactcaggaattagaatcaaatactattcgagctttgcaatttaggatgggatgtactataccttcatattattgaaggtctgaacatttagatttgtaatcctaatgttcagttttctgagacatcatccacatagaaattgcccagtaatttagataatttacatctatgttatggaaaacaaaaatttggaaattagatttctaaatgagatttgaccaattgttcttggctggttcatctagctagttactctggcagtataagaattttctgtgatctgatgagctgattagcatacagtcctgttttccatctttataacaatacagtaaaactaagtggataaaactgttttgtttcattttagtgtggatttcctcaaaaattttcaaaattatgaacatagtatttctgaggtcttactatataattgtgtgtgtgtgtgtgtgtgtgtataccataagaaattacatattttaagttgtatcatctaatatgattcagcaacagtaataaagatgtgaccttagtttcagttcttatatttggaaaatgaaaatctttcaaattgtaactaacttcgtagctgtaattcctttgtgagtcatttattttgctgatctttgtgctatatttctgtagctgaatagtacagtgtggtagctactagccaaatttagctactgagcaatttaaatgtggctagtctgagttgagatgtaactgtaagggtataaaacacttggattttgaagatatattgtgaagatgataatacaaaatattttgttaatttattgatttgcatatcagagtgatatatattgaattgaataaaatattactaaaattaattttcacctgttttttaatgtgtctattagtaaatttaaattacacatgtggttcacatttatggctcacacatttctcttggacctcttctagagggtggttatattttatctaaggtgtcagatttagaatgacacgtattcttcttttaatttattttcattcttatgttcaaaagttagaaagtagtctaaagctgtttgtatgttctgacagttaagtaacatctgttttatgcaatgtagatggacacataatggaagttatgtttgaccatcacttgaccactttttgtaatgttgaattatattggtgtgccctagaagagagggaataaggaaaaaagaaacaaatcaagaatgaaaaaagggaacatgcttctggactataggaaatgccattaacaaagaccatagtaccaatattcaggaattacctattatgatttagagttacaccatatggttttctttaataagagctattatcaaagacataataacgttcccatatggttttcttcgataatagctgattttgaaaaccaatgacaaaaagttatatttagtgattttttcaacctgagggacaaaaacttatatcaatagaatatcacttagtttctgtttttttctcttacacagcattgtcatttgtgaaagagggagtgaaagttttcatattgtaaacttctaggacacagggaagttctgtaagctcctatatgatgccaatgagaataatcttggtttgcttaaaaagtgattgtctcttttccccatcccacccccatttccatgtttatttcttttgtttttttctgaaaagacatatttaatgtcctgcctaggtttattttctatttattcacaaaataaagaataacactgttatgttttgtatttgaaattgtaaggtacatttcttttttcttttatttttaatttaactctttgttttacagatgagggcagaagtgcagttgaccaagcaggtggtgcacagattgtaattgaccatttaaggtcactgtgcagtataacagatcccgccaatgagaagctcttgactgtcttttgtggcatgctgatgaactatagcaatgagaatggtaaacaaaactgaaaacttgctttatctctgggggaaaaattaaaaattatctttactatagtgcaaaacaaaaatatttgaaaaatgatgaacaaagaattcgtaagtggcatataaaattaataattagccaacattaaatttcaatgtttcaaaaatgtaaaatggttaatttactaaatgggactaatttttgaagggctgccagttttgatcagtatcaaaaacaaaaactccacagccctatagtatgatttaagcattcttactgtgaacattttaaaaataaacaatattaaaatagttttatcttcgttatatatataccaggagtagctttaaaatatgaacactgtttgcagaagtaaaattattttatctagatgctaggtttacttcgaataattttttaaaactctaataaaatctggctttagaaacaagttcagagcaactgtagagatctcattttagaaatttaattattgtaaacagcagtttcttttctctgtaaaacatttttagaccctagaaacaagtgatgtatcaataattttcagatagcctatatggttaattaaatgcatataaatctgtgatattaaggcttcacaatacgtttgtgtcacaaaatatccatttgtttctttatcatcttatgtgaatcactgtgtggatcagacattcaaattttggtatgttcctggtatgtaacacaaataaggtctttctgtggtttgtttcataatggcattttaagttgtgatattttggcagagacattttatttgcatattagacatgcagtattattctttactttcgtgtgttgtagaaacacgtggcccttttggcatactttttattttttttcacattttatagttgtgggtccaaagaaatattctcaataattcaaaaaaaaaaaaaaagataaaccttggcaataaatggctactgatatttggcccttgttgttagtgacaacagtgaatggtggggactgtggtaagttgaagagcccttgtcctattgaaaggggaaaaccactactcttctctagccagttgtttctgtatgacggtttggccaaatactgcccaatctttatattttggggatgggaggtgggggagaaagctgaaatgtctagtttgttatgtgacatctgagttttaaatgttggattacatatttttaatactatagaagctaaacagaaagtatcttcaggcctcatcctgtccaagggctaccagttttaagcctttgaattaagataatagagtttttattgatcaaatggcttacatattaaacttgagctaataataaatggtagtcttcataggataagttacatctgtttttccttccttctggtggaatcaattttgaagaacaaatgccctaaatataaatatgagaaacagaaaggacagagcctgagaaatccacaaaataaatacatatttcctaaataattgaaatttaaccacaatacataggtgtctgaattgcattaagaaatcattggtcagattttcatattgttttctttgcttttaactgcatttgggcttggacatttgaggaagtaggaagaacactaaatgggaaaaagttttagaaatataaatgaaagaaattttaagaagttattccagttttggaagtagtagaattagtcttgttatgcatctaacctagctgttagttctttgaggaagctgttaaaaaaaaatctgtatagaggtattaatatatcagatggctggtcttcaaaagcatcactatttccaatccaaagcagtgattgagtcccataatattatagggtatcccagtgtgtagagaagtgttctgagaaagaagattataattaacagcatgtggagtgcacagtctaactgtataatatatatattttttgaagagtaggcttttttctagagctcaggcattcccaagaaataacttagagactttagaaagctatattaacttttctctgaatattattagacaaatggtctttttcttcctttatttcaaaagctgcagtttgcagcttttaaaacttatcgaataaaaaagacataatcttgagtatttttaagaaacaaatgcgaaacttgtaactatcatcatctttcctctacttcctttttacattttgtctgtcacgagtgtcttaatttgtgaagtgattctttttcttctaatgttcactgaaattatatccttttatgtatgtttggcataattattaaagcgtctttattgttttgtccattatttgctttctcttttccttaaaatttatgtttgaagacttaaatattacatcatctttactgactcagattgtttggtattgatcatgtgtacctagataagtccctgaaacaaaaaataacagctttttgaaactcaggaggcactttctattagcactaataagtgaagtttctttttatatgtatttactatgtagaacatcagtatacaagactctgctaatttataagtaaaatattgagtgacaaatagctttttcctgctgtagtagaaaagttaactgccttggacccaataacttaagccgtatctgtagttaggaagttattgttctttagctgtatgtataaaatgtttaaagtatgcttataaaaaaaaagtactgagagtggtcacaaaaatccaccaacatagtttccctgaagagaatattttcaaattatttattagtctcaaaattgaaacttagaatgtcttgattcagaagcttcctgttcatacagtaaaactcagagcatatccactttttaaacccattaaataaggaataaaacaagtttcctaaacacatgcaagtcatatatgttatgaaaatattcagtaaagtcatttttgtaccatttgctaaagctgtatataattcataatttatcagtttcaaaagttttaaactagctcaagactctatacctctaagctatgagctggatatatacttttgtttccctattggtgaagcagttaatactcaggtaagtgtagaataatctgaatagcaaaagttataattgcttagccaaagaagttgtatcaataatgcataaataaaataatatttaaataacacaaaactttagtaaaaattgttttaaatttatccattttggaaaaaatatacatgtttttcacatggtgaaaaagcactctttgattctgtggctcatgaaaatagcctgaatatttgacaattatggctgtagaaaagcttgttgacactttgacattcagtttgagggaatgtgttgaacttgctatttttttttcttcattttgttacaactttagttattctataatccaaggaactcaaacctttaattgtaggtattttaatctcattagtttgttatctgtttcctagctttggttacccaatgccaaaacattgcagtgatgactgaaaattttgttcagtcatccagctgttttcaaatataacactgttttagcacataggagtttggaaaattttcattgattgactttttctggatacttattatcgtctaaaattttcattagcaaattcaatacttggaagagaaacatgttattggaatgcatttgcttcattaaataagttagaaccattacaaactctttcccactatgttagttgatgttccttatctacgtatgatacatggtggcagcagtaaggggcattgaaaacacactggtagtaacaagtaccagatctgtaattaaaaatttcccataggtgatccacaagcgtgttgagtctgcatttgtacacttgaattaattgcacgtttgaatagaaacaaaccagtgatctaaagcaaagcactaaagaccagaacaccaccttgttgacaaatctattggtagtcaccattgttgtaagtagatgtaattaatcaataaatatctcatggaaggtgtaattgagggtttaactttttctcctagtattgttgtgctagagacacaaatagagggaaaattctattataactcttaaagaaagtggtaaatgataagcattaaacactaaagttactattttacgtaagctatgccataagagagaaaagtagaggcaattgaaagatgccatcaggaaaggaaaaagtatcttctaaaattattaacatatgcagtctaggcttcttcatctgacctatattttatatatacatgtatgatatgtgtatatatgatttctacaaatacagccgatttttctaatattttaattactcctcattattgaaaaactaatttctctttttttgtagttcctgaaatctctctgagatacctacatgataattcttatatttatttgtcgcatgggctgatgataattaagctatggttgaagggaggccatgtatgtaatttaggaagtgtaacacctgtggcatattattgaagcatgacaactgagtttaaatattaagctcattgtttaaattcacttgtttaaaaaaggcctatactacttctccccatattaaagattatttaatgtgtaattaatcttagctgctactttcagtcaatagcaacaatttcttagttcataattaaaaactaaaaagcatgttggcctgagctgcatgtttatccttatgtttcagtattacaatactttattacgggtgaaaaagagcatttcctagatgtgttagatgtttagaaaaatgatttgcttcacatgagtgaagaactatttttaaactttacttactgtggttacaagctagttaataatttatatatttcctaaatagtaaattatttttaccttactctaaggaaaaagaacaaaacaatatgtaaaaggtaaaattgtatctttgcaatttattatcttttttaaagtttttcttctttctcagagatccttgttctgatactgtcttttttaatgaaactaattttccatcatactaccttacatgtattttatttttcctctatttatgaagacatgggagatgtacatttaagttaacatcttttgaagcccagtttgtcactttttactccagtgagttaaatgaagtgtgttgaagacttattgggcagctgaaaagtacttaggcttttttattctttctttattatactaactgttgttctttatttactgttgttctcttttttaaaaattcctgaatttttgctgtttgtccaacagctttctagtcagtttgctgaaaaaggttgctttcataaagttctaccacaagtgttattttaaacaaattgtttcactaaagaatagagcagttagttagtctggtgcctcttgctaattcaacctattaaatttgaccaattagaccaggttagcttttagtgataatcttcctagactatttctatgataatgctgttacttaatgaacaggctgagagcttgattttcagtagaggtgtatcagatacacattttggtctaattccacatgatcaagtattggcatttatattcagctttggccattagagaatgaacttctgaatgtaagaagctgaaattttatcttagaaaaataaaattattatagtctttttgtcagtaattttagcagtctaatacttaaaatttggcattatattattacaggaataatactttctcagcattgttagcttctagattgctactgcgattatgataatgcatttaatatcataataccacatagatgcccacttagttgagggcagtgaaagggcaaaatatgtttggagttgctcattctttagtatggttttctcatttttatttgctttatgtctggattgaagattaatcatagccgttatcaaatattattttcaagatttttctcattgtgaaaatttgaagtggaaaaattggttttctgattttgatttcatccttacaagatgtatatcaccattaattattggtgcattttaatataataatatgcatttacatttcaactgatagaatttcaacatataaagcatataggcaaattttctctttacatgaaatgcttacctatatttaaaaataaatattcagatagtaacaagtctgaaagaccaggtctttactgtaagtgttcctatactagttgaaatatgatgatatgaggcacataatcattgatcatgcacaaatttttaggttccagaaatgatgttgaagtaagcattgagctgtttggcctttcaaaagctgaggctaaaatcagaggtaaataataggttttagccagatatctgtatttgcgtgtctaatttaggccatttacaaagtccattcagagaggcgctgaacccagaaaagcatcatgtgtaaattaacttttatgaagattattaatcctgtttttttaactataagtaaaatccagttaatactgtactgcctatattgttttatttactaaaaaatttttaagtcctacttgaaaaactagaaagtgaaatgcttttgaatatgcagatgtatcttgttaacagaatttttgccttgcaaataacttctgtgcaattttaaactgtaaaaactaaattacaataatgccccatggtaactagaaaagttttttttaagctaatatattcttttgtaaaagaagggatttctatgtttttaagcatatgtttgtaagatacacgttggaatataaattaatttggcattagcttaacttgctgtacaaaaattcaggcttaaatttatacttactgtagatgtggtctttatctcagcagtgctgtatgaaagcagagactgaattggtttctcttaataaatgctgcttaagcaacagctggcagtagtcctctttaaaaaaaaaaaagacatttaacttaaaagaccagtttttttctgagatgaaagcgtagagttttctttaatcagaataaacatatctatagaatttttttgtagcagtattcattgtaacaaaagttgatctgtaacaaataattaacctgtagtaaatatggggaaaaattatctactagattaaggcataatcactctagttgtcattatattgagaacagtaaatgaataagtttcttaagaataataaaatatttttactatctgttgatttttgctttggcatttttttgttgttgcttctgttttacatcaatctcacacatataattttgccatttatatttaaaacttttacaaaagggaaattttgccatgtagagacaatttttattttcagaacccagaaagaaccttagaattatcttttctagttttttatttgttagcgactaggaagaaatgtataaatgtattgttttaaacctccaatattgtcaatattaatgaatgttggctttttttttttttgaaatttctatgtatcattgaaatgtataatggggcttaaagcgacaatctgggtgcaaaacacatgcatgtttgatataaagaaggctttaaaataattgaattttaaacacatgtaagtaatctagtttttatatcctcaacactaggcttagaataaagttctccactttataaacatttgagtatataaagtttttaaccactaatcatcctcttggtagccatatttaagtcagtttactttgcagtgttataatagagctaaaacttgcttgaacttgaagctctacttcagttgtatcgtttctaatttttaattttcatatccttttttggaaatacagatatgtcattaaatcaaaggtagttttcttcagtctttattatgcccaaatgatttttagccaatttgtattagaacttttcatcaagagttttatttgcttctttcactgtttcaactatgctcaactcatttgactgtagatgggatttttaatgcaagcctgtaaatggcaatatcatatcattatactgtgaataatatatctacgtactaatgtacagactgtattttgaattgtgtcttgtcttgtttttacaagttcattcttaagttctatttaccaaaaagcttaatcttataacattgtctataaggccttaggaataaggtaaacctgttataatcttcttaacaaacttatttttagtaacttcagttgaatcactggaattctcagcatacttttctggacctataatctagttataccaatgttttaaacattaaacttaaaactcaggggggaaaaggttcctcaacttgagatcttctctccagatctccattctttggagtttccatgagtgtgacctgaagaacttggaaccattgaaattcaaatgtaggtaggtaagtgttcacaccagcgcatgcgttgattgccttatatctctttgtatatgcatctgtattgcaccccctcagtgcctttcttcctcttcctccccatagatcatgtagggcctgtgtcattttgatattatgtaatttcgtaaatctgtatttggtcagtgtttgtctgtgatgtgtgtcaggagcagttaaaacagagtcttcggacatttatgacattgtgctgtctaaagactgtctttcacacataagtgtttgctatgtatgggcctgggttacatttttgtgaattgctgtgtttgttgagctctgataacattctcctggaggtgctgatattcactgagggaggcagaagtagtagtcttgcagttgcttcacttaatctgcctaatgtatctagagaacaagaactatttctagttctcagaatttcttcctgtttgtctttcgcttaaaagtcatactcctgataacattcatgataccatggatgtcagctattatcctttgaaaaacatttgcaagttttctttgggcaataaaaaagatgatcaaatgaatcatttgtttatgtcaataagaatatcaacttatcctacacaaacaggacccctacttaatcttttcaaaaaacagcaccgccacctactgaattgtaacatctacatagtaactgaaataggtagactcaatctggaatgatctcttaggcttaagtagagtttcttctcaaataagcatgatgagatgttaggagctttattagtgttatttctctgaaaatatcagagtgccaaaatctaggattcctaccaagcttttatctaatttttttcctgttatcacttctgctaagcacatcattgaacttcagaatatttaccatgtttcccactcacctcccaatctcttataaaaatgagatagccctggtgggcgctgtagctcacacctgtaatcccagcactttgggaggccgaggcggatggatcgcctgaggtcaggagttcgagaccaacctgtccaacatggtgaaaccctgtctctactaaaaatacaaaaattagctaggtgtggtggcaggggcctataatcccagctactcgggaggctgaggcaagagaagtgcttgaccctgggaggcggaggttgcagtgaactgagatcacaccaccgcactccagcctgagcaacagagtgagacttcgtctcaaaaatttttttttttaaaattaggtagtcctttgacactggttcttaaattttggtcttatgattttagatgtctaaaaattatagaagacctagaagactttttttatgtatttgggttatgtctgtcaatatttactgaattagaaatttaaatgaagaaaatatttaaaattatttagtatttcattttaaaataagaaacctattatatgttaacagaaataacatttttatgaaaaatattttcccaaaaaaattgctgcaaagaatagcagtttgttttactatttgtgatggtgaagaaaacaatggctactaatacaatttggtgccattgctggtgttcatgctaaaatgccagcagttttacctaccattgctttcgtaccattggtacaaatgtcaacacagtggcaagagcaaataaaatcttgggatttttatgaaaatagctttgactttgtgatcctctgaaagggttccagggacactttttgagaaccatattctaggaggcctctttctttgtccatgaagtggaaatttatatcaacctgtttctgtaaaagtgtgttttttttttctctctctctcctcctctggaccttcattatacaagtagaatggcaggcctgccagtcggtgtgaacaaattttagaattatttgagtatgattattgttttagttagcatcatagaagtagatagatataaaagagagcacccagttggtccacagtgagttcatccaactggatggctatatatttttctcttttgtgtggtatgtgtgttgtatgtgagtatataatgaatttggctcctgggtagttagacacattttcacgaagcaacatgattttcatgaattatggcaatacctacaatgtgccatttggctatgctaactttttctcccaatctgccataatttcaaatattactgcttcaatttgtatgccaaagattgtattaagcgctataacatttctttacttttcacccctcttttacctggaaccaaaatttgtaacattgtaaaagcagtccagaaaagtgatagatatgccaagttagcagaacatgaagagcattatcttctaagtggtattcttctgttatcttctccataaaatgtgttattcctctgatgtccctggactgttggatttttcatagtttgtaccaacagaactgagggggtgtgtgatgcttacatatatgcagacatatagtggagtttgactcacattcaatgcatgcgctagtgctcacgcttacatacctgaaatttaatgattcatcagctctgcagtatttgacaaagtagtgaaaatgaatacatatataaataaaaatactgctaaagaacaaggatcttcagaggtgaccctctagtaaagagccctatctactggtaagtaacctaaataatttctaacttggaaagctccttggtgcatgattattacaaatactataaccataatgcaactattctgccaatataatatagatataacactattgtgtaagtattttacctttaagtgttgtgaattattgctaaatttcatattcagaaaaaaatttaacatcaaaagtataaatacagattacttagttgagtatattttaattcttatctccttttagatttcataacttcattacaaaatttgaaattgttttattagagtatttgaactctaaacataaacttccatttttccatgtttattttttattcttattttggtaataggcccctttctattatagatgggctcccacaaccaaaccagataattatctgtaattagccagtcatcagttttcagggacactaagcctctgttgactatctcctcatacttcactctaaaagcaggaagaattaacaacaaagaccaccaggcaataatgaactggcatgtgagatagctcaactctgtatgttcttttctgaaaatcacccacctgcttccttatctatagattaagaactataaagagtaataaaaaaaattagcaggccaaccctgccaagggattggaactatgaggaacgtgtttttgtaagaaagttttgtctttagattgcaaagagaaataaaagaatttggggaaaattattagcttgaaaatggcatatcattttaaagagaaaaaaatttgtttagtctttagattgcaaagagaaataacttaaaagaatttggggaaaattattagcttgaaaatggcatatcattttaatgagaaaaaaatttttgaagagcatttctgtatcattggatgaaccagttatggacagttatagtgttttgcataaacatatgattttttgtatgtctttcttagcttattctaagaggcagtacttttggtgttcatttttggttcatttatcttcaactttgctacaggtattctattattattgtccatgaagaacccttgtggaaatccaaggcatgtttagtacttcaaaatcaattagtttcttagaaaatgaaggcaagcaatgatgacaaggccatgttaacctcattctcttcacctctctaagccagactttcctctctcttactgagatgatctgtcactataattaaataaaactttaaaaagaaaaatattttaggtaacttttttttctggtacatctcttcctagcagtcatcaagaacactctggttgcaaatattcagaaccaatcatttttgtgtatttattaaatatttttaattttgtattatgaaaagtgtttttaaaggattctaagatttttttctttcttggtcttcattaaacttgctacttttctcatgcttttcatattctgtgatttcctgtaatgcaaatgttactctaaatttttcactcaaaaactaatggtaatgtttgtttatacttattaaaagcctgctttttaatggtataagaccccatttagaaaactaatgatttgatatagtcttcaaactatttttatttctaaatgccttttggttattcaaaggattcaaaactaaactcttctgaactaatgtttaaaatgttcaacacaatcatatgaatggacttcattttctattactgtaatttaaataactttgagtttccaatagggaaaataagaggtgttttcttcttataatgttcatttgacatgtcaacactttcttttctgttgttgttttttttttgtttttacagattcgcttcaagctcagcttatcaatatgggtgttattcctaccttagtgaaattactgggcatccactgccaaaatgcagctcttacagaaatgtgtcttgttgcatttggtaatttagcagaacttggtaagtcttagtcatgaaccacaaatgtaattaacttattaatgtgcttacaataaatttttctgtagatattaagaagctagaaatccatttagattgtattagtttattttttgaagcatttgagatatttccatcaatattttaaaaagtaaatccaattagatcttatgattgcattgtttatgagagcgttttatttccctaataattaattttacatattaatgtttaaagctcacattgtacattatgtaacagagttgaatatttacacttgtctccacttgactttaatctttttacatgagggatggcaattgtatgtccacgggtaaaaataagattgaaatgtattgcatagtggcttgtgcctgtggttccagcacttcggaaggccgaggtgggtggattgcttgagctcaggaattcgagaccagtctgggcccatctttacaaaaaatacaaaaattagctgggtgtggtggctagtgccagtagtcctagctactcaggagaccgaggcaggaggatcacttgagcccaggaggcagaggttgcagtgatccgacatcatgccactgcactccagcctgggtggcagagccagaccctgtctcaagaaaaaaaaagaaatttattacatttcatataaattgcatttttctcaggtaaagaggaatctaacgttagactaaggttcttcatcctcttttcatgaaatctcaaaacatggcagaggacttttttctatgaatatatgtgttatagtattagaaaacaaaatctgtggaatccttgaaattcagaaggcaaacaaaaccagaccaatgctggaaacacatcctagtcataacacagaggaggatgatggcctcagcacctccacctcttcatttttctctttgttatggattaccctttcttcttccccacgcccccaccttcttgtcttccttcacaacccacaatcatgttaataataaattattatgggcatagtgaaatgaaatggtgttttgtcatagctaaataccgtagttacaacaaacaaatatatcaattctgttacgtaccacattctataaataaaagcatgaagtcactagtcttggtttttctaactgaaagctcatcttgattttaacattttacttttattttgtcttccaagcaaagggaatagaaattattaaagttatttttagtaaaagtcattcttactcaatgggtcatatcccagtatttgtgaatgtttctcatcttctctcttcatctgctttttcttttttatactagcctaattaacacattttttctgtcattcattcaagtgagaccaagaataaaagtacattcatttagtatttgacaaagttattcttttccgtgattaaaatggaatgtaggagtttgtgttcagtatggttggcagaaataaaacagaaattgtgttataatccgatactgaaagtgtaacagaaacatgattggttcaaatctttcttcacttgccttcagttttatgaaaatcaaagagtgcaggtactttgctgttacattttaatgtgagcagtttctagaacagcactgtccaatacagtagctaccagccatgtggcttaatgggcattgaaatatgaagtctcaattgagatgtgttcagtataaaatacacaatcgatttcaaacactatatatgaaaaatataaaatctcatcaatatttcatatgttgattgcatgttgacatgataatttgaatatattgggtgaaataaaatattaaaatgtttactttttaacttttttagcacatcttactagaaaatctaaaattatatatatggttccatttttgctctcattatatttctgttggacagtggtgctctagaaaatgaagtgcaacagaatcatccttcactctgttaaggccctcccttttgaagttttaggagagtacatagaagaaagcaaagattaatgaaatttatctcatctaactttaaggaaaagtcagtacaaagtaaggaaattacaataatccttggataggctgtgctgaataagaacttatataattgtagttgtttgctgaggagtatttcatccctttatggttttgtgtctaaatcttgtaaatgcttcaacattaggaactgtgcagaactcctgcttgacctcatgagaggagagttgtttgttaccccaagaaatagtcatcatccacttctcaaatgagagtcaaggaaaagtattagtcattattaccgcctcttatgaaaagagcataacaagaactgtggtaatggaagagggtgggctttgagtttagtcacaggagttacaggagtctttttttttaaactttaagaaacttattccatgtagtatgtccatataaggagtcttatgttttacagtaaaagaagatcctggatctgtatcaaaccttactcacctttacagcacccgtatgaagtaaactgggcctaatccttacagttaacccaaccctgtgatttatttagtaatactaatttaggatcatacatacagtcaagagcttctgtgagaggaaaattcatttatctaagttacgaacacatgaatattgaagtattttagagttctaagacaaataacttacatatttgaacccaaatacttcaatatgtaaatattggtataactcttgctgtgtgtttaagacattataataatataaatatattaacatttctccaaaagtgccttgcataaacccagattccaaattgttcacgttagggcaatagttttcaaactttttgactatggcccataataagaaatacatgttcttatcaccacttattgtattacacacctgaaactaaacaatacttattatccttaacatattcagtgtactctgatcctaaactgatcacatgacttagtggatctctggcttttgaaaaatacagcattataggatttctattattcataaatcatttggaaggcagtcttttgtattagagaaaaataattcttgatgtacattctttttaaaagagaacttgaattctgacacaaagcatctttaagtgatagttcaaatagtttaatttctgattttagtatctatagttatttttactatatatataataggcatagcttgtctcacaagtttaattaaaacatttggtttattcaacttttaaaagtcattaggcaattaaaaattttaatggatatgtcagaaattctcagtgattatgtttgctttgctgagtataaaagaagtttttcttacataataaatatatacttgctaactgatgttttaaagtttccataatgtataccatgccagcctgtgctttctcactaagcagtgtttttactgagccctgtgaactccagagatacctgcaaaagtattgttggaagagtcaaaggcagggaatggtttaatatttaatccagtcattttctcatttgggaaaaaagtgaaaggtttttcaaaagctaaaaccccagaaataagcagaagtatttgccctatagctctgtcggtcagctctgttaaccaaccctttttaaacatagatactctttaggatagccaaagttatcaaccatccacctcttatactttccattctgtgcgtcttttgagtatctcaatggatagtgcttgccacatattattaaatgaataataatatgaatgacccaatcaatactgtaatatcaatgacatttgggaaatgggagtgtatgaatccatttgcactaccataaaggaatgcccaagactgggtaatttataaagaaaagaggtttaattggctcatggttctgcagggtgtacaggaagtgtggtgcctgcatctgcttctggtgagggactcaggaagcttacaatcatggcagaaggtgaagagggagcaggcgtgtcacatggtgagacagggagcgagagagagagacaaaggggaagtcacagactcttaaccagatctcatatgaactaactcacttatcaccaaggggatggtactaaccattcatgagggacctgcccccattatctaattacctcctgcctggcctcacctccaatattggaaattacgtttcaacatgagatttggaagggacaaacagccaaaccacatcagggagttttcattggacaaataaggaaaaataatatgaggacaaaagcagagcacagtatactgagggagccctggcctggtaggagagaaaagaggtaagtaaagagttgcaaagacaaccttgtctaccttgctgatttctctggtatacagggaaaataagccattgaaaacagtttgatacaagttgctgtgctaagatagcagatttgtttgagaggctgcgtagaccacctctattcagcctagtctcccccagtctatgttaaaagataaatatgcagctaatttagttcagcccaggttcatactataatttcagtggttactgccctaccccatttggaggaagaaaggataagagaaaaatatgtgtatctaagacttctcgagtttatataatgagtcagttatgcccatgtaatagctaggttgtatacatcaacacgggagtggaacatgtatgcaccagaataatgtttctcctttcagagtgagctttcttgcctgttaacaagtaatgtatttttattgattcgtgtaaatatcaagtgtttaaaattcatgtcacatacttctgaatatgacatattactaaatgctacagttactttttgtcaaaatgtttttaataaaagtgttaaataacaaatttgtgtatttttgctgactagtgatgagatgtaatagcttaaagatgaaatggaaataatttaacaagtgcaatctatttcagaattgggacagaaaggaaaatacagctctgctttattaagtttcataaattttacaggattaaagatgttttcattttttcccaataatgaaaaaaagattgttttcctcctgattgttatttatgcacaataatattaaagagaaattggcctttaacccaacactctttaatataaccatggaatttttttttgttcccttcgagtcccaatgaatgtgtttacataatttttcatacttaaaatcatagcatgaatatggttttaaagtatgcattcttatttaacatggaataaacagaatgagactttgcctcttttaaaattttagttggaaactaactaaaacccttcagtaaagagatttcttcttaaaggcttaagacctcaaggattgggagcccaaggcaggaagattgattgcagcaggaatttcaagaccagcctgcgtaacatagtgagacctccccccgacccactctctaaaaacaaaaagcaaacaaataagaacaacctcaagggaagggaataaaaaagaaaagcaggagagaggattgtacgagaatattttgggacctgggaagaaaggcaataacttacatagcaaacctttgacatctgaatcctggataagaaaccaagaactaaccagtttgcatttcacagtcttcaaaaggcttgggatttgatggcatcaagatttctagaccctctttcccctttcacaccttgtgatgactaccccttgcctatccaaggagaatgctatgcttcttgtcaggatggacgaaaaagagggtttcttgatggaggatatgacactaaattgaagtaaaaggtaccacagtaccaatccataaacagattaagtgaaatctgaatgccgagaaccacagttttattgccccatttgtctcccagaacgtagacttaaagttatttatattgagggttctctacaaaaggccagcagatgaccctatagggaatcttgcagtcaacaagactactcgtactcatagctcctaatcagtttattattattattatttttagttcctaacttcatcaatggcagacagctcaagaggtgagggcaatctctaacatggaagataaatagagaaaagcaacagtacacttttcttaaggagaacagaaaagagcttgagcattaagaataattgctaagatgaaagacaaaaattggagaaatagttgtacgagtaaaggaaaaaaaaaaggagatagaaaataaaagagaaaatataagaagatcagaccaagagtattagaaaagttaacagagaggaggaaattgccaaataagtatcacagaactgaaatacaaaatttcctacattgcaaatatctgtcaaataaatgtcctaaggaatgaaaatacacccagaccatagcgcatcaatgtgaaattttacaatgctgaggacaaagaacatcttacaagcttctagagaggatgggggaagtaaagttgaatacaaaagatcatgagtccgtggacatatgtctcaaaacaacattggcagccagaagaaaatgcaatgttgccttcaaaatttttagggaagccagatcaattaggcaaggaagaaataaagggtgtcaaagttggaaaggaaaaagtcaaattgtgcctgcaaacatgatcttatatcaagaaaaacctacagactccaccaaaaacctcttagaaccaaaaaatgaattcagtaatgttgcaggatacaaaatcaacatgcaaaaatcagtagcatttctacacactaacagtaaactagctgaaaaggagatcaagaaggcaatcctatttacaatagctataaaacatataggaataaacttaaccaaggaggtgaaagacctacaaggaaaactacaaaacactgatgagggaaactgaagagaataccagcaactagaaggacatcccatgcttatggattggaagagttaatattgttaaaacggtcatactattcaaagcaatctgcagattcaatgcaatccctgtcaaaataccaatgactttttttttgtggagatagaaaaaagtagcttaaagttttcatggaaccacatgtaaaacccaaactataaaactagtaggcaaaaacaaaagagaaatgcttcaggacattggtctaagaaatgtttatgtataagacgtcagaacacaggcaacgaaagcaaaaataaataggatcatatcaaatgaaaaagcttttgcaaagcacagaaaacaacagagtgaaaagagaggctacagaatgggagaaaatatttgcaaattattcatccaactggggatttattccagaatatccaaggaactcaaacatctcaacagcagggtctcactctgtcacacaggctagagtgcagtggccaccttagcctcccaagtagctgggactacaggcgtgcaccatcatgccccatttgtttttgtattttttgtagagacagggttttaccatgcttcccaggctggtcttgaactcctgggctcaagcagtccacctgccttagcttcccaaaatgctgggactataggcgtgaaccactgtgtctgccccagtcccatttttaaaatgggcaaattatctaaacagatacatctcaaaagaagatacaaaaatggctaaccaatgtatgataaaatgttcagtatcactaatcttcagggaaatgcaaatcgaaaccacaatgacatattatctcaccccagttaggatggctattattaaaaagacaaaagttaacaaatcctggtgaggatgtggagaaaaaagaactcacactgggagtgtcaactagcacagccactagggaggttcctcaaaaaccataaataggccagatgtggtggctcacacctgtaatcccaacactttgggaggctgaagcaggaggatcacttgatgccaggagtttgagaccagcctgggtgacatagggaaaccatctctgcaaaaaatttaaaaattagcctggcatggtggcacaggtgtatagtcccagctacctgggaagctggggtgggaggatcgcttcagcacaggatgttgagtcaggttgcagtgagccatgatcacaccactgcactccagcttgggtgacagagcaagactccatctcagtttaaaaaaaaacacaaatagaactactgtatgagccagctgtctccttactgggtatttatcaaaaggaaaggaagtcagtattgaagaaacattacacacccatgtttactgcagcactgttcacaatagatatgggatcaacctagatgcctaaatacatgaagaggtaaaatgtgatgtatatgtatatacacacacacacacaatggaatactattcagccaccgaaaagaatgaaatcctgttttcttgcaacaacatggatggaactggaagacattatgttaagtgaaataaaccaggaatagaaagttaaacactgtatgttctcacacatgtggaagcttaaagttgattttatagaagtaaaaaaaaaaaaaaaaaaacggatactagaggttgggaaaggtagcaggaagagggataatagggaaagattagatacagaagatacaaaattacagctagataggaggagtaagctttagtgttctgtaccattgtaggataactatcgttgacaataattattacatagtttcagatagctagggggaggatattgaatgtttccaacacaaagtacttgagatgatgaataagctaattaccctgatctgcttactattcattatatgtaacaccacagtgtaccccatatacaattattatttgtcaaataattacacttttttattttttgagggaaaatgacttccaacatagaatcctatactctgtcatactatcagttaagtgtgagattataataaggatattgtcacacatgaacatctcagaaaatttcttaaatactttatctctggaagccactggaagttgggttccaccaaaacaagggatttaaatgaagaaaaactacataggagctgaaaacgaaatccaacaagaatcccaagtattacagtgatgttatcgtcccatgtggcatgctttcaagaagcaaccaatccaggttgggttaggtcaaaaaactggtgggatggtgcttaggagagttcttacaggaaatgaaattgattaatatctaaagtgaatgcattaagattagaaaactgctggagtgtttggagttgcattaataacaagcacatagctaagcaaatgaggaaaacattattccaggaaaaatgaattagtgtattactgaaacacaactagtgatataaacaaaattacatataattagaaagatgatggagagtatggtgaacacaggaaagaaagaaaactagtgtttcatctttcatagtagaaatttgatcagaaatgccaaataaactagcagtacaaatatgtagtttagataatacgtaagtaaacagtatgaattagctaaaagagcttcatgtatttgtgaggaagaagaaatggaggagaggaaactggagtctgctgataatattaggctaactctttaaattcatagagttgtaataaaaataaaaccttagtaaatgaggcttcttgccaaaggcctgttgaggatccatggcacttaattgatagatataatgtccaaattatacttcatgctgtcttttcactctgttcacctgcaggttaagtacagattttgttctataattcctatattaataatggtgcataatttccttatactggcaaacagagcctgagttacatagcaacagtgatttggtttccttttattaagtgtttggaggaaaagaatgtggattggaaggaatagagtaccaatactattattttaaagaagagtaagaacatgtaactagatgaatgatgatgtctatatactttacctatgattttatgtttttgaaatccatctcacttggacaattctctgaagcagagggataaccaacaaagttccagggataaatcatctctacttactttttatttattttttttctttttgggacagagtctcactgtgtcacccagactggagtgcagtggcatgatctctgctcactgcacctctgcctctcaggtttaagtgattgttgtgcctcagcctcctgagtagctgggactataggtgtatgccatcacgcccagctaatttttgtatttttagtagagacagagttttgccatgttggccaggctggtctcaaactcctgggctcaagggatctgcccaccccagactccggaagtgttgggattgcagggatgagccaccatgcccggcctcatctctaaatgaaacctcctttttgggtggagtgtgctgacatttgctgaatgtggtctctgagggtttcagtatcttattggaaaagacaccctacccttactttttttcccccttggcatgtgaagtaagagctaaagccgtagttttttgtgacattaaagaatcatacttaaagtcttggagtggatttttgtcattttggaatagatccgttgacaatgtgcaccaaagcagtgtaataaaatgttgatcaaaactgtatttaaccatattaatgtgtgtctctcctgttaaatttgcaaatttcttacttgatagtaacacaagagatttaccagagactagcgagcagaatgtaaccctgataattcatttacatgttcatttactcataaataacttcattttggacacctgctttataccagggactattctgtgcactatgtttctggtggttgaagcagtatgtactgcccctgccctcaaggagcttatagtttagtgtgtaagatggacatttattttaaaatagtttgcaaataaactaacatataattacaagttattataattgctagtatgagaaagtaatagagtaaggtaagggattaatttaaattagaagcatcaactctaggtgggaaagagcattttcagacaatcagtattttcaaaatgtctacctcctacatacacattatacagtagctttctcacgacactgctggaggatgctgccatcaaaacaaaacaaatgaaagagaaaaggcatagataacagggtatctagtacaggaaggagagataatgataaagataacccaggaggccagctgtgctaccagagagaccagtatatattagattaggtcagaattcactgaaagaaacttgtagaaaaattaataggatacttaatgcaaccaaagacattgagaggagaattggagagaaatggaatggatttgggttggattttggaggtagattgacagaccttggtgatttattagatgtggaagttgagtgataataaatgagcagtgactcctagatttctgcctgtgcagatagacagagtgttcatatactgagttgaggaaccctggaggaggaagatttcacagtatgtcaaaagcccctttttggtattgagtttagaatgctagagagatactcaagtagaggtgtcaaatgggcagttaaatagcctgatgtccagaagagggttatgaatatttatgttgtataaatatcaacacagagatgctgtttggtgctatggaagagcattggatagcctcaggtgagaataaggactgagaaggtaaagcaaaggatgaatcctaaggaactagaatttatacaggtcttgtggaaaaggaggaacaattataggagattgctaagtgtagaggcaggtaggccaaaactagtagatttagtaatgcatgtgagttgagagagtagaggcagtgtatgtaagcaatgttatcagaaacttatttgtaaaagcaaaaatgagcttgaatggtagttgatagaggtggactagggggaggatgtttgtttttaatattgttttatgtgagaaataccaaagtatatataaatgctgatcaatggtgaggctctaggagaggttggagatgctgagaggcaggaatgaatgaaaccccaattactcatgcagaattagtcttcaatagtagatatgtcaggaccagtgtagaaaacattccactttaatgatactaaagataagtcacctttaattcatccatataaaatatgttatgagaaatttttctttgactaaaatccttaaaactatgaatttatgacttagtaattttgttgttgctgtggttactagagaacctttttttatagctcaaatataattgggtcagaacattttctctaaagccttagatatttttccttttcagggacattaaaaatggatttgattgttcccatatttgaagagtatttgtatttatcagtaatggtacaaaataactaagtattgaaagtattagaaaacagtttctggactttatttggtttaagtttttcttttttattttacagagtcaagtaaagaacagtttgccagtacaaacattgctgaagagctagtaaaactcttcaagaaacaaatagaacatgataagagagaaatgatttttgaagttcttgctccattggcagaaaatggtgagaaacttaaatgcacctttggatttttgatcatgtatgctttaaacttttttcctaatattatttaattgccagccatttgactcaaaaccattctttattagtgatatgttttattttgcatatctctaactttagctatgttatctactccatagctatatctacattggccaaagcaactttccaggttcctttgattttaaaatcttagaaaagatacttctgtagctaacacattcttgtgccattctggaaaaggcagctgagaggctgagctctacttctacacacttgtaaggcaaaggggataaaagttggagtctcaggcctgccaacagtgaagatactggttaatcactcccttctttgggcagaaaaatcttaagagatgcatcgtagaaataagaatgaatcagaagaaacaaactattccatattagtaatttttcaaatataatgtctaacacgtactcaaagaggatcagatattaatacataagacaaaacacactgtaagcaagagtaggcagcaaatcttcagatactggaattattagacactgattcaaaacaggtgtgcttattgtgttcaaagaggtaaaagctagcttaaataatttagaaggaaactaaaaactatttttaaaaagtggcatagcagatttaagaatgaaataaatggaaatttctgaattgaaaaatacaaccaaaattaagaattcagtgggtggtttaatagcagatttaatagatactgttgaattaaagaaccagtgaactggaaaacgggttggaaagaaatccaatatgaactaaaaggaaagaagaacacatttacataaaagagaataagaggtcagaggaaaaaatgagacattctcatatgcattttttggagtcccaaaaggagagtagagaaggtggggaggggagtgtgcagaggcaatatttgaagaaattttggcagagaatttatcagaaattatgaaaaatgcaaagatccaagaagccctttgaacccaaaatatgataaacaaaaatccacatctagatgcctcatactgaaaatgtagaaaaccaatgaccaaaattattatcttcaaagtaacaacagtttggctgacagctaccttctcaacagcaacaatgaaagccagatgttataaatgtggtttgtcagaaggaaaatgatatagatgcaggggagaataaagaccaaaaaaaacggtagatatataggtaaatcttataaacattgaatatatcaaaaaaataacttattgtgaagtttacaatgtacatttatgtgatttaaaatataccacaaactgagcttataaataagaagaaaggtaaaaggagttagagtcctaagacacttgtgttatctggaagactctggttatttagtcacttttaacttttaaggtgactactaaagtaattttttaaaatgatatatagctgcagaacaaatggaagcgacttatggaaaggttttttaataccctagtaatgcaaaacaagaaaaaagaggaaagaaaaaggaacacgaatcatagaggacaaatgaagcataaaaatacagttttaagacacagtatttcagtaattacgttaaatgtggcctaaatgctctaattaaaagaccatttgtcacttgtgttttaaaataaataactatactacttaagcaatacttattaaatatgagatttaaaagattgagaataatagggtagaaaaaatataccagtgaaacctaaggaaggctggggtagttatattaatatcaagtaaaatagattttaagatgaaaagacttgctagagataaagagggtgactttagtaataaaaggtccaatttacctagaaaaaaaataaccgttatacattatcccaaaacatacggagcaaaaacattcagaactatgaagagaaacagacaaatccacaaatattgtgagaaattttaatacctctttcaataatttatagaataagatagaagaataaggttatagaaaatttgaaaatgattaagacaattgatttaatggacctattttagaacacttcaactacagagctctttcaagtacatatgaaacatttaagaacatgtatacttgtcatgaaagaaagaaatttcaaaagattgctatcatacaaagtatttctttgacctaagtgagttgtctagtaaccaattataaaaagaaaaccaggaaatcgctgtatgtttacatggtaagaaatatacttccagtacctcagaggtcaaaaaagaattgtaatggaaattagaaatttttctagtagtgaaaatgaaaatgctatatctcagatcttacgtgttacaagtaaagacctattcagagggaaattttttgctctaaatgcttatattagaaaaggaaaagaactaaaatcaatgagcccagtattcatctcaggaatttaggggaaagaaaatataaacccaaaaaaccacaaggtaatttttcaaccctcaccttccaatttgtgtgaatatgctcatagtagtctctgataatcttttgtatttctgtggtagcagctataatgtcacctttattgtttctgattgtacttatttgaatcttctctctttttttttgttaatctagctagtggtctattaattttgttaatctgcacttgtactccctaaatctacaaaaaaaaattttttaagtagttaactggaataaaatacaacaatgttaacaaaatccaagagtaatatatattcttttaaaaagcagaagaaaagatagggtatcaacctaagtgtccatcagtggatgagtggataaagaaaatggggtgtgtatacacacacacacacacacacacaacatggaatactactcagctataaaaaagaatgaaataatgtcttttgcagcaacttaaatggaactagagggcattaattctaagtgaagtaaccaaatgccacctattctcacaagtggcagctacgctatgtgtacacaaaggcatagagagtggatagaatggactttggagacagagggaggtagtgagatgagggggtgaggggtaaaaaactacttattaggtacagtgtacactattcagatgacagatgacctaaaatcctagactttgccactatacaattcatccatgtaaccaaaaaccacttgtaccactaaagctattgaaattttaaaaaaaataataataagcagaaggaaggaaatgtaaagagctgaaataaaatggaaaacatacagtgcaacacaaacatataattactacagttgagtctgaaaagacagtggaattggtaaacccgtagtgagattaatgatgaaaagagagagaaagcataattaaccaaaattaagaatgcaagaggaggagaccttaccgcaggtcttacagctattaagaggatattatgaacaatttgatgcccatatattttatatatatatatatttttttttttccctcccccgcaagatggagtctcactctgtcacccaggctggagtgcagtggcaccatctcggctcactgcagcctccacctgggatgcagcctccatctccgaggttcaagcaattctcctgcctcggcttctcaagtaggtgggattacaggcgcctcctaccacgcctggctaatttttttatttttatttttagtagacacggggtttcaccatgttgcccaggctgatctcaaactcctgacctcaggtgatccacctgccttggcctcccaaaatactgggattacaggcatgagccaccgtgcctggcctgatgccaatatattttaaagtatgactgatacaagaatagaaaagctgagtaatcttaccttaagaattcttccagagaataggaaaaggaaatatacttaccaatttattttaatgaggctaatgaaacctttataccaaatcccaacaaagacaatacatgaatgaaaattaaaggctagtctcaccatgaacatagatccaaaattcctcctaaaattttagcaaatttactctagtaatatattaaaaaaattaatcacaccaaattgcatttattctgaaagtgtaacacaatttaatatttgaaatgcaactagtataattcatcaccttaaaatatttaaggggagaaaccatgatcttctcagattttaaaaaaagcttttcataaaattaagtgttcattcattatttttaaaaacttaggaaaacaggactaggaaggtcttcaatctgaaaaagatatctatgagaaggctgaagaaaacatcacaatcaatggtgaaataaaaaagcatttgctttgagattgggacaagaaggatcatccccgcttccatttaacattgtattgtaagaagtatccagtgcattaaagagaataaaagaaaaaaaattaagataaagcaataaaactctcattcatttatgatgtgattatgcatatttaattcaaaagaatctatagatcagttttatagatctttttttaaatcagaattttgttaggttactgccaaaaaacaaacaagaatttctatataccaaaaaagaaaaaacagaaaataaaatgtgaaaaatacgttggatagcccttttagctggaactgccaccttccagtaatttaacaaaataatgaacacaaagggaaagagaagcatctgatatgtattctgtaggccttttagaaaatacggagttgttcctttagccacatacattcaaatctacaggaaaggtgatattgtagacatcagaggaatgcatcctgttcaaaaagggaatgccccacaaattttaccatggaaaaccaagagtctatggtgttacccggcatggtactagtgttgttgtaaacaaacaagggcaagattgttgccaaaataattaatgtgtataatgagcatattaagcactcaagagccaagatacctccccgaaacacatgaaggaaagataggaaaagaaaaagaagggagccaaagagaaatgtacctgagttcaactgaagcaacagtctgttccacctagagaagcgcactttgtgagaacaaacggaaggggcctgagctgctggaacctcttccctatgaattcatggcataataggtgttttcaagataaaaggcttctagactattaaaaagtatataaaaaattaattccagatagattgacctaaatgtgaaagttaaaacttcagagggtttatcttaaaatgtaagctaggagaatatcatcatggccttgaaatacttttcttagatcacaaaaagctctaatcataaaggaaaaaattgagacattggttactttaaaagtaaaacttctggctagcctggtggctcatgactgcaatcctaatggctttgggagggcaagacgaggatcacttgagaccaggagttcgagaccagcctgagcaacatagtgaggcctcatctctaccaaaaacaaataaataaaagttaaaactctttttttaaagacaccgttaagagtgaaaagcaagactggatgagagaatataattataacatataactgacagagggcttgtgtatacagtgtataaaaactcttaaaaatcattaagaaaaatgtgaaaaacattttaataagcacttgacaaaagatttatattaagtccaacagacttaatatagatatgaaaatgttcactcttaggtaacacaaaataaaaccacaataaaataccactatacacccactggaaagtctcataaaccaactgttgatgagggtgtggaacagtgggagtgtaaattggtacaattgggaagtagtatctattgaagttgaagcaatagatccaacaattctgctcttagaaatatacccagaagcttgtgcacatgtataccaggaactgttacaggaatgttcaaagcagcattatttataatgaaaaattggaaacaaccaaaatccattaacagtagaatgaataaatcataggatattaatataatggaaaaatatagagttatgaaaaggaatgaagacagctgtaaccattactgtggatgaatctcataatgttgaaaggaaaaagccaacactgaaaaatacatattgtatgattcaatttatataaagttaaaaacaaaaagtaaaactaaactgtagtttttaggaatgattatttacttggtaaaatgatgaaagtatagaagtgattaccataataaccaggatgatttgagacaaatgaaggaaggggtttgttatcagaaacagaaatgcagagataggcttcctgagttgttggcaatgaatttcttgatctaggtgatagatacatggttatttgctttctaataatatattaaacttaacttggatattttatgcacttctctgcatttgtggttttctttcactctttaaaaaaagttttaaaatacctatatatgatgcatacatgatacatacaagtgtacattcatacatatgtgtgtaaacagtggtgataaagatacttgtccttggacagaatggttttggtaaatgtgctgggctgtctgctttggcagaatgtcttgctaatcctaattaaggtagtttaagcctcctatatatttgttttcaggtatttgatttcagtcaaattgtgagaagagattatctgtaaactttaacattgagacatttaggctgggagtgatggcttacgcctgtaattccagcactttcagaggccaaggcagaaggattgcttgagccaggagttcaagaccaacctgggcaacacagcaagaccctgtctcaaaaaaaaaaattaattaaaattttaaaactacaatattgacacatttaaaatttcttaaatgtcttaggtcctatttcttagggagaaatttgttttttatctcattggtgttttggcaaagtaaaaattttactgtgaccttcagtcaattttaggccataaaataacctataactttccttgcagtatttcaaaataacaatgtgttgatatttattactgttttcccctctgccttcacatctgttttataattgcacaatggataggatgataccattgaaggcttgtttttggactaattctttgcatgtatcatccttcattttcccagtacacgaaggagagtgatttcagcattagaagttgggatttgtatagttcaaggattttagtatttttaaggctttttcatcatagtttttaattctagtcaccacacatctctagccctagcattctgtaaccaaggaaacgccctacttttagcatggcacagtacaagtgtaccttttaaagaaatattccaggttgaatactctgtgtattctgagataatattcaaaagaagatcagtgatcctagtgattcaaaaaagccaaattttaacacattaaaattgcctgaaagtcttaagtatttatttttaaaagtctttatttttcctaaatgataagctgaagctgccattgccatatatggatgcatatacagcttagggaaaccaatgactaaaataaaatccaactgaaaaaataaagtttaaatttaaaaatttctggccaggtacagtggctcatgcctgtaatcctagcactttgggaggccaaggcaggaagattgcttgaggccatgagttcaagaccagcctaggcaacatagtgagaccctgtctctacaaaaaaagtttaaaaattagccaggcatggtggcatgcacttttagtcccagctactcaggaggctgagataggaggattgcttgagcccaggagttcaaggatgcagtgagctatgatcataccactgcgctccagcctgggcaacggagcgagacactgtctcttaaacaaaaaatctgtgttgcaaatgtatttttcaggtgagttgactagcatttatcttaaggagtatcaactacactcaaagcatttagataggccagtttaggttaagatacaaagatgagtaaggtgtatctattgggggaaccagcccccaatatttcaatgtatgttctattttccctaaatgtcggcccatctgagaaatagagaaagagtacaaaaagaggaattctacagctgggcctccaggggtgacatcacatatcggtaggtccgtgatgtcccctgagccacaaaaccaggaagtttttattagggatttcaaaaggggagggagtgtacagggagtaggtcacaaagatcacgtgctttacagggcaataaagatcacaaggcaagggcaaagcaaagatcacaaggcaaagggcaaaattagaattactgatgagggtctatgtttggctgtgcacgtattatcttgataaacaccttaaacaacagaaaacagcgttcgagagcagagaaccggtctgacctcaaacttaccagggcgggatcttttccgcaccctaataagcctgagggtactgcaggagaccagggcgtatttcagtccttatctcaaccgcataagacagatactcccagagcggccatttatagacctccccccaggaatgcaattccttccccagggtattactatttttttttttattatactttaagttttagggtacatgtacacattgtgcaggttagttacatatgtatacatgtgccatgctggtgcgctgcacccactaactcgtcatctagcattaggtatatctcccaatgctatccctccccgctccccccaccccaccacagtccccagagtgtgatattccccttccagtgtccatgtgatctcatcgttcaattcccacctatgagtgagaatatgcagtgtttggtttttgttcttgcgatagtttactgagaatgatgatttccaatttcatccatgtcactacaaaggacatgaactcatcattttttatggctgcatagtattccatggtgtatatgtgccacattttcttaatccagtctatcattgttggacatttgggttggttccaagtctttgctattgtgaataatgccgcaataaacatacatgtgcatgtgtctttatagcagcatgatttatagtcatttgggtatatacccagtaatgggatggctgggtcaaatggaatttctagttctagatccctgaggaatcgccacactgacttccacaatggtggaactagtttacagtcccaccaacagtgtaaaagtgttcctatttctccacatcctctccagcacctgttgtttcctgactttttaatgattgccattctaactggtgtgagatggtatctcatgtggttttgatttgcatttctctgatggccagtgatgatgagcattttttcatgtgttttttggctgcataaatgtcttcttttgagaagtgtgtgttcatgtccttcgcccactttttgatggggttgtttttttcttgtaaatttgtttgagttcattgtagattctggatattagccctttgtcagatgagtaggttgcgaaaattttctcccattttgtaggttgcctgttcactctgatggtagtttcttttgctgtgcagaagctctttagtttaattagatcccatttgtcaattttgtcttttgttgccattgcttttggtgttttggacatgaagtccttgcccatgcctatgtcctgaatggtaatgcctaggttttcttctagggtttttatggttttaggtctaacatttaaatctttaatccatcttgaattgatttttgtctaaggtgtaaggaagggatccagtttcagctttctacatatggctagccagttttcccagcaccatttattaagtagggaatcctttccccattgcttgtttttctcaggtttgtcaaagatcagatagttgtagatatgcggcattatttctgagggctctgttctgttccaatgatctatatctctgttttggtaccagtaccatgctgttttggttactgtagccttgtagtatagtttgaagtcaggtagtgtgatgcctccagctttgttcttttggcttaggattgacttggcgatgcgggctctttcttggttccatatgaactttaaagtagttttttccaattctgtgaagaaagtcattggtagctttatggggatggcattgaatctgtaaattaccttgggtagtatggccattttcacgatattgattcttcctacccatgagcatggaatgttcttccatttgtttgtatcctcttttatttccttgagcagtggtttgtagttctccttgaagaggtccttcacatcccttgtaagttggattcctaggtattttattctctttgaagcaattgtgaataggaattcactcatgatttggctctctgtttgtctgttgttggtgtataagaatgcttgtgatttttgtacattgattttgtattccccagggtattattaatattccttgctgagaaaagaattcagtgatatctctcctacttgcacatccgtttataggctctctgcaagaagaagaatatggctctattctgcctgaccctgcaggcagtcagacctttggttgtcttctcttgttctgtaaaatcactgttattctgtttgttttcaaggtgcactgatttcatattgttcaaacacccatgttttacaatcagacttcatatttttcaagcacacatgttctacaatcagtttgtacaatagtgatcctgaggtgatgtacattctcagcttacaaagataacaggattaagagattaaagtaaagacaggcataagaaattatgagtattatttgggaactgataaatgtccatgaaatcttcacaatttatgtttttctgccacggtgccagccagtcccaccatttggggtccctgacttcccacaacatatatctgctcaggagatagatggagacagatatggaggcaaatataagctcttcagtgaaataagtgttataatgaaagaatacttaaagatattagaagtataataaaaagtgttgatgtgggggtggagtttcctatgaagatcagttttaaaaatgtaattgggatgtaaattctgtctctaaaataccttatgttatgtttagccatcagaaaggttcaaggttatttttttcttttaacttttattatgaacattttgaaatgtattcagaaatagcatttagtaaaccaccatgtacccatcactcaagaaagctttaaatcaatgaaaacctgaagccctttttaaaaacacgactttatttatttatttatttaatttttatagacagggtctcactctgttgcccagactggagtgcagtggcacagtcatagcttactgtaaccttgaactcctggcctcaagcaatcttcctgccttggcctcccaaagcactgggattacaagtgtaagccaccatgcccagccctattttatagtattttatagcttgccctttaaacatgagcatgatatctagagtaatagtggagtgatactagttgctttcagagctgagtatcaatttgtttagatgctgcaagacatcctgaaaaatttggcaatttcaaatggaaatatgaaataaagcttttttgtatatttaaatgaactgtcaagatagtttactttgaagatttgagtttcaaaaatgtattatctaaatcatgcattttcttagttttttttttttttttttttttttttttttgagacagagtctcgctctattgcccaggctggagtgcagtgttgcaatcttggctcactgcaagttccgcctcccaggttcacgccattctcctgcctcagcctcctgagtagctgtgactacaggcgcctgccactgcacctggctaatttttttttgtattttttagtagagacggggtttcatggtgttagccaggatggtctcgatctcctgaccttgtgatccgcccatctcggcctcccaaagtgctgggattacaggcgtgagccaccgcacctggccctcttagtttcttataattctttataatggactgcttataccagagctcctattttatctcaaagtttgattattttgttcacgttgttctttagatgctattaaactacagctggttgaagcaggcctagtagagtgtctactagagattgttcagcaaaaagtggatagtgacaaagaagatgatattactgagctcaaaactggttcagatctcatggttttattacttcttggaggtgagttgtaatttatgccagccaaagaatgtggttgtcagatgtttttaaaatttattgtctcttctgtaaatactaccctagacattttctcatattcctatctcacctgctattgaggtgatgattttgacatcttaaacatgccattgatacaaccagacataatgaacctgaaaaagaagtgtcttcactatcttccagtatttgaagagctgtcacatagaagagatagctttggcaccaagggactaaagaaaagctagatggctccctgggacttggactagaaaaaatgctagactctattgtctagtatctattaaatgtttattataaaaagaatcattacttttcccattatgaatgtaacagtttgtgaggtgtgagtttccagttggatattcacctaagaatgtgaatttgttactcctagttatttttctcttgcttaactattcgtttcatttacctccagatgaatccatgcagaagttatttgaaggaggaaaaggtagtgtatttcaaagggtactctcttggatcccatcaaataaccaccagctacagcttgctggagcattggcaattgcaaattttgccagaaatggtaagcatattagttcctcctttgttagtcaaatactctatatttgtttatttttgctttgctaccacatatactaaaactggaacagtttagaagttgtgtaatatgtgtatatgctgctaacttaatttttcagaaatctgaaatacttagtgacattcctaacaaattacatattttatgcaattcaactaaattctaatagtttaaatatcatgaagtgcttcttttgaatacttggcacttcagagcttagtaagtttgaatcccattctagtatacatctgctttcttttgcctagtgattttattttggatctaattatctgagtattcattctaggattattgtgcctcaacttatatacttttatgcccataaaacttaagtatgaataatcccctggcatcgtgtagaatgtttaatttagtttaataatgtttcagggggcgccagacttctatgtttatgaaatctggcactaccaaaaaactcaaatacagtctagaaactcattcttacgttcctcatgaaatataccgtgtctaggaaatacagtttatttttctttttagtttaatcatcttccagtacaaactgttggtatatattatatcataatggcttacttgctccatttttactccttctttttgggagtgacttcctaattatggaggtaagagtggcataatatggataattattgaaactagatatggggtaaatagtggttcattataatattctctccgctttgtaagtgtttgaaaaataatttaggtatcagccatgatagcaaaaggtagagtactatcactgtaacattgggagaacacaagcatacatcacaataaatgaaaaatattggacattctaaccatgtgtttctacttctgatatattatctggctctaaactaaagatttttctggtaattttctgattttaaaacttttatctagtttaagaattttttttaacacttctcactcagtaaacagaaaaacctataaatctgatgggagaaagatttggaattcattttattgtatagctccattttccctaatgtagataatagccagacatcagtattataaagtatttatagatattttaaagaggaagaaaaagatgtgtgttttttttttcagatgcaaattgtattcatatggtagacaatgggattgtagaaaaacttatggatttactggacagacatgtagaagatggaaatgtaacagtacagcatgcagcactaagtgccctcagaaacctggccattccaggtaagacttaagaatagaaggcagctgtgtacaaaataaaatccatcatttggggaagctattaactgtatgtgatttgtgaacctgctctgatgaagaaaatttaaaaaaaaatagtcttcacattgttcacattttttcatgctaataaatggagatcatatgttaaataagttttgtgagactgtacaagaataatctttgccttcattcagatatcctgttaccttttgcgaactgttagattttcatcatgttttatagttaagcttttttaagtttgagatggggtctcactctgtcagccaggctagagtgcagtgacgcagtcctggctcaccacagcctctaccttctgagctcaagttatcctcccacctcagcctcctgaggaacagggactacaggcatgtgccaccatgcccagctgattttttttttttgtagaaacaggatctcactatgttgcctaggctggtcttgaactcctgggctcaagcagtccacccacctttgcctcctaaagtgctgggattacaggtgagagctactgcaccaggccttaggcatctttagttgaggtagaataatgacatcaattaacagagtccactcaagaatgactttcagttgttgtttttctataagcagatgtacaatttttttaaaatagccttaatgtgcctttggaagtcatgaaatcactgtattatggaaaatacaacaaaagatagttaaaactattcttttatcctactttctaaaaataaatttctgattagatgaaatagtacaattacatgatgatccaatccatttgaattcatttggtttacataggatagtaacatttattaatgtctataacatttatattaacacagttggatcaaaaacggaattgtgctttttgttgtaagagggtaacattttcagatttcctttacaaactatgtaagtaagtgttttggattggatctaaaaagccatgatactgtcataaaaattattatattgtctgttatccgcttatacacaaataggatacggacacacacataaacaactgaattccattcttaaaattgacaaaaaagtgacaagattgtttctaaatggaaaaataaaacatggatcttaaagatacttaataaacctgtattgaattgaatgtttatcaacaggaatgctaataccattttaaccatagtctctctttttctccagttataaataaagcaaagatgttatcagctggggtcacagaggcagttttgaaatttcttaaatctgaaatgcctcctgttcagttcaaacttctgggaacattaagaatgttaatagatgcacaaggtaaaagaaatgttttccccaacttgcatttttcatatgatagtcttaatgtgcctctagttgaaaaaggacttgtttttagcttttaggattatgtaatcataaaaaatagcaaataaaagatttaaaagttggttttggaactccatttgttaatttttatgcttgttataattatttatttatacatattatttatttatttatttatttatttatttgtttatttatttatttttgagacagagtcttgttctgtcacccaggctggagtgcagtggtgcgacctcagctcaccgcaacttccgcctcctgggttcaagcaattttcctgcctcagcctcctgagtagctaggattacaggcatgctccacaactcctggctaattgttttggaatttcactagacatggggcttgttgctcaggctgctcttgaactcctggcctcaagcgatccacccacttcagcctcccaaagtgctgggattacaggtgtgagccaccatgtccagcctataattgactttaaatagaaattataccatatctctccttattagtacttatagtcctggttttaggttgctttattcatcagtttcggcagggggtgttgtgttttggcattctatacccatttttaccttggctttgaaatcaaatttcattattgtgacagtcaaaaattttttaaatttgtcttccagacagggagagcatttttctgtttgcagaaacagcagtcagaaccactcctaggaatgaattatgtttatttacttatttctaaattttaaacccttttctatattgattgcatagagtctttctaagaaccctgcattatagtccgccagagcactaacagactagcaggcttaaccaaaagagtatgaagtcatttgttgttgtattttctataaaatttcacagtgttacagaagaaggcaaatagcccatcacataaggaatatttgcagttctagctttaatgaaattgtcgtgctgtgtttttttagacgtccttcacactctcaaatctgtacgaattatttcaactgattgtctgttagtgattcattccttggtttgccttctttcctatagcagaagctgctgaacaattgggaaagaatgttaagttagtggagcgtttggtggaatggtgtgaagccaaagatcatgctggtgtgatgggggagtcaaacagactgctgtctgcccttatacgacacagtaaatcaaaagtaagttccagaggaaactgttcactagaaaacttcagagtgtctttttcagaaacccagcattgtaggtcctaacaactgggataatatttacctgaaagtattgtgaagattcagtgagatcatgtatataatgtgcttagctgatacatgggatataggaaacactcggtaaatgggggttgctgttgttgctgctgctattgttgttattacttttaccaccaccgttatcagcatcagtgtcaaacattctttgtgccaggcattgaccatgcagcctactgatatttagaaattaaatggtacctagatagtatatgatgtccagagctcacagagttagaaaaaaatccattcttgtggctggctgtgccgctgtctggcacatggtagataaccaataaatgaacaaatgagctattttaaagatcacaatagtgagtacccaggccagcagttcagcagctgatttagtatctagattatatgatttttaaattttttaaatactgttttcttgttgggcgtggtggctgacacctgtaatcccagcactttgggagactgaggtgggcagatcatgaggtcaggagatcaagaccatcctggataacatagtgaaaccccgggtctactaaaaatacaaaaaaaaattagctgggcgtggtggcgggcacctgtagtcccagctactcgggaggctgaggcaggagaatggcgtgaacccgggaggcggagcttgcagagagccgagattgcaccactgcactccagcctgggtgacagagcaagactccgtctcaaaataaaataaaatactgttttctttttcttttttgagactgagtcttgctctctcgctcaggctggagtacagtggcacaatctcagctcattgcaacctccacctcctgggttcaagcaattctcctgcctcagcctccagagtagctgggattacaggcaggcgccaccacactcggctaatttttgtatttttagtagagatggggtttcaccatgttggccaggctggcctcaaactcctgacctcatgatcctcccaccttggcctcccaaagtgctgggattacaggcatgagccaccatgcccagcctttaatactgttttctaaggtgaccctttcagtcatttctcttgtacaacttcagtagtgattatatatgaggagaaagtttagaactcaaatccaccagctgttttcatttatttttagaacagataagaagaagatgccaagagaaaaaacgtaaaactaaagctgttcttgtataaatctctttcatataaataattggcttcaccataatagctgtcccagctggtaagcctcaggagtgttcttctccatcagatgctaaatcttgagaactttccctggggaaaagcagctgttaactaggaccttcctattacctgtctcacccagaccaccctaaaagctcatacatttttcctgacacaggaccaagcagtatgttggcaaggtggaagttgtcaggagagaatagcaaaatggcttccttggtacccctttgaccccttctccatcataactgctctctcacgcccatttgttcatttaacagttaatatttgagttcttgcagtgtaaatactaaaaaatagtgtttctataaaggaattaactatccgttgaggggacagaaataaaaacagctagcttaagtacagctttaaagctacgtatgctattcgggtgtaacagaggaaagaaagactaacacactgtctgggtaatctgggatggtgccatagaaggagtgctattttaggcgttaactaggaatctcaggaggaaagggaaagagaatgaaggaaagggccttttcaggcaaagacagcaggatgtacaaaagcacagagatgtaaaacagcataattttttaaagaaactgcaaataaagcagtattgctagaacacagagtgtagaaagagacagtagccagagaggttgaaaactgggaattaagtgaattatataccaagttaagatatatggacttgattctgtagagaattcgggagcacttaaagggttttaagcagcaagttgccattatttgagggtttttttgttttctttattttttgtttttttgttttttcggggtttttttgagacagagtttcgctcttgttgcccgggctggaatgcaatggtgcgatctccactcactgtaacctccgcctcccgggatcaagtgattctcctgcctcagcctcctgagtagctaggatcacaggcgtgcaccaccatgcccggctaattttgtatttttagtagagacggggtttctccattttggtcaggctggtctcaaactgccgacctcaggtgatccgcctacctcggcctcccaaagtgttgggattacaagcgtgagccaccacacccagccatttagttttcatttagaaagatgtctctagggtttaatgggggtagaaaggacagttattgcaaaaatatatatgagagttgataaaggactgaattaaggttttgagttgagcaatttgaaattgctgatattcagccatttttgaaacaaatttcatatgggttattcaactagaagcagcgaggatggaaaagaagagacagacctgagaaaaatatgggtggtagaattgacagattcaacagtagaattaaaggaggaggtagttttagagctaattccaagtttggggtttaccaccagattgggttatcatgccattcaacaaaataaaacactataggaagaggtgcagctaacactccctaaacttgcccactcgcccatgctctttggagtcattacccttaatctttttgctctactccaagagaatctccaccattggtttgcaggggtatacaatcatttggatttccctgggccatattggaaaacgaattgtcttgggccacacataaaatgcactaacactaacaatagctgatgagcttaaaaaaacaaaaatcacaaaaaaaactcaaacacctgtggcatttgaagaagaagagaaatctaaaagtttagaaaaccagctgagtgcggtggctcacgcctgtaatcccagtactttgggaggccaaggtaggtggatcattgtggtcaggagttccagaccagcctggccaacatggtgaaaccccatctctactaaaaatgcaaaaattagccaggcatggtggcgtgcgcctgtaatcccagctactggggaggctgaggcaggagaattgcttgaacctgggaagcggaggttgcagtgagccaagatcgtgccactgcactccatcctgggtgacagagcaagactcccaagactctgtctccaaaaaaaaaaaaaaaacaaagaaaacttttggaaaacatatttgggagaataatcaaggaagacttctccagtcttgctagagacctagacgtccaaatacaagaagctcaaagaatacctgggaaattcattgcaaaaagatcattgcctaggcatattgtcatcaggttatctaaagttaagacaaaggaaagaatcttcagagctgtgaagcaaaagcacgaggtaacctataaaggaaaacctatcaacttaacagtggatttctcagcagaacccctacaagctagaaaggattggggccctatcttcagtctccttaaagaaagcaattatcagccaagaattctgtatccagtgaaactaagcttcataaatgaaggaaagatacagtgtgtttcagacaaacaaatactgagagaattcaccactaccaagccagcactacaagagctgccaaaaggagccctaaatcttaaatcctggaaacacatcaaaacagaacctctttaaagaataaatctcacaggacctacaaaacaaaaatacaattaaaaaaaaagtggggggtatacaggcaacagatagcatgatgaatggaatagtacctcacatctcaatactaagattgaatgtaaatggcctaaatgttccactaaaagatacagaattgcagaatagataagaattcattaactatctgctgcctttaagagacttacccaacacataaggactcacttaaggtagaggggtggaaaaagacattctatgtaaatggataccaaaagtcagcaggaatagctatcttgtatcaggcaaaacaaactttaaagaaacagcagttcaaaaagacagagggacattatataatgataaaaggccttgtccaacaggaaaatatcacaatcctgaatatatatgcaccaaacactggagcttccaaatttataaaacaattgccaatagacctaagaaacaagatagacagtaacacaatagtgggagacttcaatactccactgacagcattaaagaggttatcaagacagaaagtcaacaaagaaacaatggatttaaactataccctagaacaaatggacttaacagatatttacagaacattctacccaaaactgcaaaatatacattctattcattagcaaatggaacttttctccaagatagaccatataatagaccacaaaacaagcctcaataaattttaagaaaattgaaattatggcaagtactctctcaaaccacagtggaataaaactggaaatcaactccaaaaggaaccttcaaagccatgcaaatacatggaaattaaataacctgctcctgaatgatcactgggtcaataacaaaatcaagatgggaatttaaaaattctttgaactgaacaataaatgatacaacctatcaatacctctgggatacaacaaaggcgttgctaagaggaaagtttatagcctgaaataggcatttcaaaaagtctgaaagagcacaaagagacaatctaaggtcacatttcaaggaactagagaaacaagaacaaaccaaacccatacccagcagaagaaaggaaataaccaagatcagagcagaactaaatgaaattgaaacaaaaaagacaatacaaaagataaatgaaacaaaaagctgattatttgagaagatgaataagattgatagaccataaccaagaaaagaagagagaaaattcaaataagctcacttagaaaagaaatgggaaatactacaactgacaccacagaaatacaaaaggtcattcacagctactatgaacacctttacatgcaaaaactagaaaacctagaggagatggataaattcctggaaaaatacaaccttgctagcttaaatcaggaagaattatttagataccctgaacagaccaataacaagcaaccagattgaaatggtaatttaaaaattaccaacaaaaaaaagtccaggaccagacagattcacagctgaattccaccagacattcaaagaataattggtaccaatcctattgacactattccaaaagatagagaaagagggaatcctccccaaatcattctgtgaagccaatatcaccctaataccaaaaccaggaaaggacataacaaaaaaagaaaactacagaccaaaatccctgatgaacatagatacaaaaatccttaacaaaatactagctaaccaaatccaacaacatatcaagaagataactcaccatgatcaaatgggtttcataccagggatgcagggatggtttaacatacccaagtcaataaatgtgacacaccacataaacagaattaaaacaaaaatcacatgatcatctcaatagatgcagaaaaagcattccacaaagtccagcatctctttataattaaaactcagcaaaattaacataccagtgacatacctcaatataataaaagccgtctatgagaaactcatatccaacataatactgaatgggaaaaagttgaaagcattccctctgagaactggaacaagataaggatgcccactctcaccacttctgttcaacaggactggaagtcctagccagagcaatcagacaagagaaagaaataaaggtcatccacatcggtaaagaggaagttaaactgttgctatttgctgatgatatgactgtatacctagaaaaccctaaagactcctccaaaaagctcctagaactgataaaagaattcagcaaagtttccagatacaaaattaatgtacacaaattagctctcctatcaccaagagcaactaagctgagaatccaatcaagaactcaacccttttacaatagctgcaaaaaataaaataaaataaaatacttaggaatattcctaaccatggagatgtagttttacaaggaaaactacaaaacactgctaaagaaaatcatagatgacacaaatgaaaacacatccaatgctcaccgatgggtagaatcaatattgtgaaaatgaccatactgccaaaagcaatctacaaattcgatgtaggtcccattaaaataccaccatcattcttcacagaactagaaaaaacaattctaaaattcatatggaaccaagaaagagcctgcatagccaaggcaagactaaacaaaacaaatctggaggcatcacattacctgatttcaaagtatactataaggccacagtcatcaaaacaacatggtagtggtacaaaaataggcacacagaccaattgaacagaatagagaaccgagtaataaccccaaatacttacagccaactgatctttgacaaagcaaacaaaaacaaaatggggaaagggcaccatattcaacaaatggtgctgtgattattggcatggaagaataaaactgttgcctcatttccaacttaatacaaaaaaaaaatcaacttgagatggatcaaggacttaaatctaagacctgaaactaaaaattctagaagataatatcagaaaaagccccttctagatgttggcttaggcaaggatttcatgatcaagaacccaaagcaaatgcaataaaaacaaaggtaaatagctgggacttaattaaactaaagagcttttgcatggcaaaaggaacagtcggcagagtaaacagacaacccacagagtggaagaaaatcttcacaatctatacatctgacagaggactaatatccagaatctacaataaactcaaacaaactagcaagaaaaaaactaataatcccatcagaaaataggctaagcacatgaatagacagtaatgaagatatacaaatggccaacttatgaaaaaatgctcagcatcactaatgatcagggaaatgcacatcaaaaccacaatgccataacaccttacccatgcaagaatgtccataatcaaataaaaaaataatagatgttggcatggatgcagtgaatagggaatacttctacactgctggtgggaatgtaaactaatacaaccactatggaaaacagtgtggagattccttgaagaactaaaagtagatttaccatttgatccagcaatcccactactgggtatctgcccagtagaaaagaagtcattatacaaaaaatatacttgcacacatgtttatagcagcacaattcacaattggaaaaatgtggaaccaacccaatgcccatcagttaacgagtgaataaagaaactatggggccaggcatggtggctcacgcctgtaatcccaacactatgggaggacgaggcaggcagatcaccaagtcaggagatcaagaccatcctggctaacatggtgaaacctcgtctctactaaaaatacaaaaaattagccaggcatggtggcgggcgcctgtagtcccagctacgctggaggcttaggcaggaggatggcgtgaacccgggaggtggagcttgcagtgagccgagatggcaccactgcactccagcctgggtaacagtgcaagacgtgtctcaaaaaaaaaaaaaaaaagaaaagaaactatgatgtgtatatatatatatgatggaatgctactcagccataaaaaggaatgaattaatggcattcgcagcaacctggatgagattggagactattattctgactcaggggtggaaacccaaacatcatatgttcttacttataagtaggagctaagctatcaggatgcaaagacataagaatgacacaacagactttggggacttaggggtaaagggtgggaagggggtgagggataaaagactacaaatatggtgcagtgtatactgctcgggtgatgggtccaccaaaatctcacaaatcaccactaaagaacttacttatgtaaccaaacaccacctgttccccagtaacctatggaaataattttttttaatcacaaaagaatttcataatgttttaagaaagctacgaatttgtgttgggccacgttcaaaatcatcctgggctgcaggttggacacgcttggtttagagttttggcaaaccataattgtattaactaatttacagacatgatcctggcatctgaatttggaactctcagataaattcctgttacatgtagtagtaaggctcgtggaaaccttgattaatctagtatcttcagtatcaactaacagaattacataaccaaaccattcatggacacaaaaatatgtccacaggaagatacatcccagcttcttagaaacatctgaatttaggagccagaactacttaaatgctataatatttaataaatttaaagattttgaggcttttctgtgaattttgttcatagatccccctttccctcatctaacctcccacttctcgcccatccccgaaaagaagagttcaaatacccatcaccacgcaggttctttgaatgatgagaactgtggcatggtacccttttaggaaaaggtggatgggggtgtgtgtagcagaaaacaacttgaaattatataggattgtaactttatagttacatattacaactttaggattacaattcaatacctttacatatctttcctacaattgagagtatactgctgctaagcagccaaggagccttgattctcacactttaatgagcagaactataaagtgtgttaattgcatgagttctatgtcagagctgttattttctaacttaaccagtgttacagtagacatgactgcttttgagcagcagttcaagtttgtttcatcaaattataatcccaagaaatcttctacaaagaaagagttgcataggtagattagttatgcaaatagtaattatttttttctttgcctttgagattcacagcacacattaatactaaagaaacctctttaattttatttgaatccactgattgccaaactgtttgaccatggatcctttctgcaggtggcatctgttattacactggacgtactttggaaaaatgctgttctagaataagtttttaaaataattaaacaccaggttcaaatgtattacattcctgtagatccttagccagctgtgtgaatcacagctctctccttgtgttgttcttaaactttgaagatcatacctcaccctgaattccgtcttggagttcaacccttcaaaagtttgcactgactcacaaggtttcatgctgcttagtcatctcagcactttgcagtgtattcctgtgctgatgctcttaggtaaagtcacacctttctttgaaagagtgccctagtctaggactgctgaccaactagctgaatcttccaattatagacatcaaaaatgtaaagagaaatataggttgcctttataccaggaatataaaaactccctgctatcaaagccagcacttttctttaacctttaagagtagagaattctttatcagttaccaggctaaaaacttgtttaaacaaatgtatttagtcatttgctcattcatccaacaaacatttatttaaatcccgtactgaaaaggctttgatgatacaatcttgaaaaagaaaatttttgttaagtggctcaccaactcaatggctataccaaccggcaatcttataaaattacctcaaatcaaagcctatctgaaaatattccgttgtgatcaacatgatacagttttcaacagtcttaacctgggttgatttcactaatcaagggcaaattgactaaatgctaaatagatgaaattgttagcatggataatttgccttggttttatatataccaaaatttagctttctataagaatagaactatgaaataaaacatgtttcagactgcataaagcatctccagaatttttaagaacaaagacccactaatcagccaaactgcctaggttttagccttggctttaccacttatttattgtctgaacttgggcaaatgacttcatctgagcttcagttccttcatctatatgaacaggagatgatatctagctaatgagattttctgcaggataaaaatttgctaatatctataagctactcagtacaatgtccagcttatagttattgctccataaagggttgccatcaatattattctgtcacatgtgacgaatacgatgttttatctattttttaatcccatattctataaggcaaaatgatttcatagaatagctattcaataaacatttgttgaagtagttggtgagagggcaggaatttttttttttaattatactttaagttctagggtacatgtgcacaacgtgcagatttgttacataggtatacatgtgccgtgttggtgtgctgcacccattaactcatcatttacattaggtatttctcctaatgctatccctccccgctccccccatcccacgacaggccccagtgtgtgatgttccccagagggcagaaattttaaaaaggactcaggtatctgttccggaaaagtgagatgaaagtatacctggccaaagagaggacactgttcatttctgatgtacacatttccttagttcattccctactcttccttctactacactggtcttttaagtgtgattagaaacatagaggacaaaatgacagttcaaacatcttccctaaatgattgcatatgtatctgttcatctcttatggtcttctttactcaagctcttttgtgatttttataaaattttttactaagaattctgtgtctgtttcaaataaactgttgctgagtaaacagtaaattggggaggttagaaaaagctttctaaaacagattgatggggaaaaatgtattagatgccagaacacagctaccataaaaacttagttcttggactctatttagcaagtttgatcactaaacaagtttgggctcaaagcaaagatactttctaaaaatagttttctcaaaaaatttttatgaaatggaagcataaagcaaaccctttaaaaatattttagcaaatttggaaaatatttccaactacaattaattttgaagctgactcaggctttttaaaatgtccagaccttcaaattattaaaaatattgaaaatagagaaaattatttttaaaatattattgagacctcctactaaatcagatttagttcaagagttctaagacaacggaacccttggtggaatgaagaccaaaaagggtactagaaataaaggtgaacattttttttttcatctaacttttgccagatggtcttatatgttttctgtgtaataactttgtaataacaaaaacctatgagatatatacttacatcattccagtgacatggagatagtactgaggtaagagaggttcagtaatttgctcagtcagtgggatttattgaatccagagcttgatgtctcctctgtcatggagagaagacagagctctaagcaccatgagaaatgagggcagatggagaattttaagttctgctcagtctttttgcatgtaattcagttttcatatttgtaagattaaatcaaggggtaaaaagtacttaaaattttttcataaaagctttacctggaacatctgcagaacaactacctggcactatcatgaaaatttaaaagcaacttttttttttttaagaggcaggttctcactctgtcacccaggctggagtgcagtggtgtgatcatagttcactgcagccttgagctccctggctcaagcagtctcccacctcagcaccctgagtagctgggactgcagatgtgtgccaccatgactggctaatttttttattttttgtagagatggggtctcgctatgttgccaggctggtctcaagcgatcctcctgttttggcctgtcagagcactgggattaacgtcctgagccaccgtgcccagctgagaacttttttaaattccaagttttattcttgtttgtcaatcctaaggtaggtcaacatttaaggcagtgacatttttacttctttggctttggtagcttctaagccttctgttttttaatatgaactgcagtggtcttttctacttaggcaatttaagttgtcatcttttgatgaatgtatttaaagctaaaagctttttccttttcttctgtggagaaaaaaactatgattaaatcaaatgattcatacaggacactgtcgcaaaaccactcaacaatgagttgactgattttaatgcatgttccttatgtttaaaattaaagtctataattctctgatattatttattgtaggatgtaattaaaaccattgtgcagagtggtggcatcaagcatctagttaccatggcaactagtgaacatgtaataatgcagaatgaagctcttgttgctttggcattaatagcagctttagaattgggtaagtaccccagtgacaaacttattttcttctatttttatcttggatgaaaggaagtatagaagtggagttgaagtcagacagaaccttgactggaagcattttgctagtgtctgtaccgttctctgaatctatggaaaatcattctatatagattgttacagctgtcccctttggctgtgtttttggtaacatttttagggcaatgcattaaggtaagtttaacttttaaataatgtctcaagttacagccacttagagaatagagaaaacgttttcagcaggcttcacagagaaaccaaacaatatttagaatatgacagcatatgaagagtctgctactctcccagtgacccatactttctcttccatctctgctggttctctctactaccgattctttcttgctgttctccttctccatcaccgtgacttctattgccttactctaatgtcttgtcttctgtgttacccttctgtgtgttttgcattcagaactcccccaaagcagaggctaaataggctaaataatttcattagtttcagtttaacatagcttttttttttttttttttgaaacagtcttgctttgtcacccaggaggctagagtgcagtggcgcaatctcagctcactgcaacgtccgcgtcctgggttcaagcaattctcgtgcctcagcctcctgagtagctgggattacaggtgcatgccactgtgcctgactaatttttgtatgttttgtagagacagggtttcaccatgttggtcaggctggtcttgaactcctgacctcaagtgatccacccacctcagccctcccaaagcgctgggattacaggcgtgatccaccatgcccggccctaatatagcatttctgttgggcagaattcatcacgagaagctaatccgtagacatctagtttatgaatagcataagctggatggctttggagccaacccaagacagtcagccagggatggtgtaatagagtcacgtggcctgtggttaaggcctaaggctgcttaacacaaaggaggactttacacttagtagggatgtcctatccaattcaaagccatttgggtaaatactgttaactgatagcctcttaattcccactgacaacttagatccataattctcacactggggcgaatggaccctccaaccccagttccaggaagaggaaacactcatgtgagtatttttttatgtgcatagtgtgtaatgatcaagtcaaggtgtataggatatctgtctccttgaatggtctgttggtgactggaagccttaccaataacagtcagtgaacatatattttgtatatgaattatatactatattcttataataaagccagagaaaagaaaatgttaagaaaattgtagggaagagaaaatatatttactatttattaagtagaagtggattatcaagaaggtcttgaatccttgtcttcacactgagtaggctgaggaaggggaagaacagaaggggcttaggcttgctctctcagggatggcagaagagaagaaaatccaggtataattggacccacacagttcaaacttacgttgttcaagggtcaactgtatattctttggtgaaatgctgatttttgtcttttaaccattttttttttgactgttgagttttgagagttctttatatattctaaaaattttgtagttctatattttacatttaagtctgtaatccattttgagttaatatcggtataagtcacgcctgtaatcccagcactttgggaggccgaggcgggtggatcatgaggtcaggagatcgagaccatcctggctaacacagtgaaaccccgtctctactaaaaatacaaaaaattagccgggagcggtggcgggctcctgtagtcccagctacttgagaggctgaggcaggagaatggcgtgaacccaggaggcggagcttgcagtgagccgagatcgcgccactgcactccagcctgggcgacagagccagacgctgtctcaaaaaaaaaatatatatatatatatatatcggtataaggtacgaggtttaggttagggttcattttctttgtcccatggatgtctaattgtactagcacctttcgttgaaaagctgtctttcctccactgcactgattttgtaccattgtcaaaagtcagttgagcatatatgtgtgagtctatttctgggtcttccattcagtgcctttgacataagtgcctatgttgccaccagtaatatgctatcttgattactgtagctatagagtaagccttaatactggatggaggaattcctcacactttattcttctttatcaagatggttttagctattttagggcctgtggctttccatgtaagttttagtataagcttgtatattttctacagaaaatcttgctaggattttgattgaaattccactgagtccttatcttttatttgtggagggaattatgtgatttataggatttgctccaaaataatttgagatggatgacagcaggtgaatgagagagatcggccataattctttaaggtgataagtgcataaggtatattattataccatcttttctgattttgcatatgtttaacattttccataataaaaagtttaattgtctcatattaaaagaaatgtgttagtattaaatagtaagcttaaacacctgaagtgtctactaaaatctaattctatttactcttttcacatggtctgaatttaatattatttttctaggtcattattatttatcagttccatttagaaggtttcgtatggtcaatttcttcaaaatgaagcagtgtttatcctgaggatactgggttcgtacgcagtagatatactttgttttatttgtaggcactgctgagaaagatctagaaagtgctaaacttgtacagattttacatagactgctagcagatgagagaagtgctcctgaaatcaaatataattccatggtcctgatatgtgctcttatgggatctggtaagtattcttctatcatttgatgtccataaacatatggttcacattaaatattaaatatagagtaatagtaaatgatggttttgggttttaaagccgttagaaattagtttatggaggttataagataacttttttcccctattactgtaaacactcatttcttcatggtgatgacattgaaaatcttctcttctagctgtcttgaaatatacactacattggtattttctagccatccaactgtataatagatagaattacttttcactgaagacattcccaaaagattctcactacaatagaaagtatcatatagcaaatctagacaacattcagtattgcaaaatcagtaagtctcatgaaccctaaaatgttattttatagcaggcacaggttctgattttgtatgccataatattaactaaggaatttgtttaggaggccaggcacggtggctcatgcctgtactcccagcactttgggaggctgaggtggtggatcacttgaggccaggagttcgagaccagcctggcgaacatggtgaaaccctgtctctactaaaaacacaaaaattagccgggagtggtggcacacgcctgtagtcccagctactcagaaggctgaggcaagacaatcgcttgaacctggaaggcagaggttgtagctgagagattgtgccactgtacttccagactaggcaacagaacaagactctgtctcaaaaaaaaaaaaaaaattttttttttcaacaaatcattggtatatcttctatggacattggcatatcttggtatatgttctatggacacctgaaaagagtgtgtattatgcagttattgggtactgttgtataaatgtgaatttgattctgttggtactagtgtcaagtttcctttattcttgctggttttgcagttaattgttctgtcaattgtcgagaggaagggtgttgaagtctcccactgtagatttacctatttctcctttcagttctgtcaatttttgcttaacataattttcagctctgttgttaggtacctacacctttaggattgctgtgctttcttaagggattgacccttttatcattatatagtgtacctctctctggtatttttctttgctctcgtcaactttatctgactttaacatagctacttctgcttgtttttttattattactattttattttctttcatgtgccactacaagaagccatcctactttcttttgaataacattcacatgatcttttctcactcttttagtttcaatctgctgtatttgaagtgagtttcctgtatacagcacaaagttgtcattttctaatctactctaccagtcccttttgtgtatttagaccatttacatttaatggatgactgatatggcttaagtgtgcaatcttatttttgttttctgtttgtcacatttcttctttatttctgacttcctatgggttaaacattttttaatcatttacatttattcttccatatatatatatatatatatatcttttttttttttttttttttgagacagagtcttactctgtcacccaggctggagtgcagtggcgtgattttggcacactgcaacttcttcctccagggttcaagtgattctcatgcctcagcctcccgagtagctgggattacagatgcctgccacatcacacctggctaatttttgtatttttagtacaggcggggtttcactatgttgcccaggctgatactgaactcctgaccacccgtcagggtgatccacctgccttggcctcccaaagtgctgggattacaggtgtgagccaccacgcccagcctctcacgtatatcattcttaaatatttcttctacatatatttagaatcacgttagacagtgttacaacttttctttcaaccaccaaacatatttcagaaaactctttgaaagagaagggaagtctatcgtatttacgcacatttttagatttcttatttttgttataatcattccctttctgtttagagaacttcctttagccatactgctagcaacagatttttagccaaaaaaaatttttttcattcataatgaaagggaaatgacattgtcaaatgacagaaaatgggtataggattctgggttcacagttcttttctttctttacttgaaaactattgtgccacttttttctagcctccctggtttctgatgagaaatccattgtgttcttatgtgttttattcccctgtaggtaaggtttcatttttgtctctcaagactttctttgcgtttagtattcagaagtttaactatgatgtgtcttggcatggatttctttgggtttatcctgtttgagtttgctcagcttcttgaattgataggtttatgtcttttgctaaatttgagaagttttgactgttacttcttcaggtacttttcagccccattctatccactctttccagacctttgttgacactaatgtgagatctttaattatagtcttgtaggtccctgaggttttgttcttttttacccacagattattttctttctgttgtacagactgagtaatttctattgttttatcttggaagttctctgattatttcccttgtcccctctattctgatgttgaacctgtttttatttcagttatatattttagttaaaaatttccatttgcttcttctttatatcttttatttccttgcagagactttgagtctcttccatttgtttaagcatttttagaattgtggtaaaacatacaaaacataaaatttactgttttaaccatttttaagtatacagtttaatggcattaaggacattcacattgctgtgcaatcatcaccagcatccatctccagaaccaccttcattttcccaaactgaaactctgtactcattaaccaataactccccatttacccctccccacagcctctggcaatcaccatttattttgtgtctccatcatctgacaactctagtcaccacatatatgtggaataagaaactcctgtccttttttgtctagcttattttacttaggtctttaaggcttatctgcattgtaggcgtgtcagaatttcatttccttttaaagctgaataattttccatcatatgtatatatcacattttgtttatccattcatcaatccatggacatttgggccatttccaccttttggcttttgtgaataatgctgctgtgaacattggtatgcaaatatctctgagcctctgcttttaattatttttgatatatactcagaagtggaattactagatcatatggtcattcaatgtttaatttttttattaaatactgtttttactaattaaatactgtcatactctttttcacagtggctggaccattgtacatttcttccagcagtacacatggattatcatttctcaacatcctcaccaatatttgctgtgttttagtaatggccaaactaatgagtgtgaggtggcatcttactgtggtttttatttgcgtttccctaatgattactgatgggaatctttttatgtgtttgtgggccatttgtatatcttctttggagaaatgtctattcaagtctttgcccatttttagaattgaagggtgttgttgttgttgttgttgaattgtaagagttttgttttttttgagacggagtttcgcacttgttgcccaggctgcagtgcaatggtgcaatctcggctcaccgtaacttccacctcccaggttcaagcgattctcctgcctcagcctcctgagtagctgggattataggcatgcaccacctgtagagatggggtttctccatgttggtcaggctggtctcaaactcccgacctcaggtgatccacccaccttggcctcccaaagtgctgggataacaggcgtgagccaccacgcctggcccaagttgtaggattttgtaccagtaccccactatcttgattattgtagctttgtagtaagttttgatatcagttagtatgagaactccagctttgttcattttcaagattgttttggagatttagggtcccttgagattccatatgaattttaggatggatttttctattactactaaaaacactggttcattggtttatgtcagtcatatcaaaataaacacatcagtttcagtagtactgattacattaagcttattagacttcactcatcccatataacagttctcagagtcctaacaggaatcctatattttcttgtaattgaagttaaatagagaaagcaagtcagaaagaagaggacaaaaaatctaaaagggagtccagtgtcacagaaatttgttgaaggatatgaagtataaacttttcttttgccacaaaattaatttgaaacatatcctaagctttttggtaagtcattggacttcatatttgaactggtgatagggttgtatgtaaccaaaccttgagatcatacagtgagctgtgtttaattataactcattattgtaattaatcttacattgtagaacttgacgtctcgtttttctttttaaaaattgggcaagtagctgtgcagtggctcatgactgtcatcccagctacttgggagactgagcaggatgaatcccttgaggctaggagtttgaggctgcagtaagctgtgaccatgccactgtactcaaacctgggcagcagagcaagtccccatctttaaaattttttcctttaatttaaaaaaaagtaaagtttttatgatttttttaaattataatacatttctaagaaagacattgctaggctactgctatgtctttttccagaattgtttctagttttataagcttagtcttgtcaaaataaacattttggtatatgttttggatagacttagaacaacctaacagaatcatatctgttatttttttgtcttccagaatgtctacacaaggaagtacaggatttggcttttctagatgtcgtatccaaacttcgcagtcatgagaacaaaagtgttgcccagcaggcctctctcacagagcagagacttactgtggaaagctgagaactgcccgatacacggcatcatcccatctctaatttcccctctgtcctccatccagcggcttcttccgcttcattctctaccataccacttgtgcatgcatgtgatgttctaataccaattgaagaaccgctgtaggtacctccctaataagatttctaaacctatagttagtgtgatcatgactttgtcaaaggcaagtctccacccataaccgttctcttgtattcctgttgcttgagctacattaagtagaatgtgcatgttgtagtcctatgatgatgtaaacttggtactacataatgacttgctccacacatgcagtaaactacataatgatgtactggtaaactagaaacaaagaatgcagcaggatctgtctagcttattaaagatgaaactgaattggaaaaatagctccattttttggtgcttgggaagcacagtgaccaaaaaagttgtatggctgcttattcattagtctttcctactgatgtcaaatccatggtacctagagttaaataaaattccaatgctcttactctttaacttctggtttctcctttttcctttttagactattgaaactgccacaaacttggcaagactttctgaggtttctgattccatatttaattgactattatcaatagcctgatattgaaaaacatttgtagttttcagtgtgaaactaaggggttgaagaatcactattacaatccctattacagagcatttcgggttttgcttgtattttagattctgatacatacgctgtttcactcaggaactacttctaccagttaatcagcattatccagcacttgtctttaaaattcatttggcgcttgtttgttttcaactgaggaaattgagtatagttcattgaagaatggaatttttttttttttttttttttttgctgtttttcatcattcagctagaaagtgagaagttttatcttccatagtccttttaaatcttatgttagaactagcaggacgtaggtggaaagatgaagaaataagcttgtctagactaaagaaaggaaagcaggttataaaagccatagtagccagtccagttcattctgcagatggccccataccaatcgctgttagagtttgccacctccactttcccactgagaactgcagcaattttaaaggatatgagaaagccaagactcaagagatgagaagacccccttggcgaaatatagtgtactcttcactgccactgccaccaccaaatgggtttttagagctttgaaacacaatctttgtaaattaatcaaaacctccctgtgacccacctgccttctccccatacccaaatttgaccactactggcctaaaaggcaagatgggcttcgatatagaaggactgcaagacagtagaaagggctgccacggaggtgacagtagctccttcctctccaacatgtgatgctacacatctctgtggataatctaagttggacttttgactctaaaacagctataatccaagaaagttaaattctaatggaggtaaagaatcttgactgattgttccctttgatgtccaaataagggaactattgtgagtacgtatgctacacttactataagaatgatactgtttgttgtctttctcctgggctggatagtggactatattttattacaggctttgaaagacatctgtaatgttgcatatctgttcatattaataacttaataaatagtatatgaagctataatggcatcatttggtttgtttgtatattttgtctctatttccagctcctagaataaggcttgctattgatgttcaacaaatatttgttgactgaatgaatgaatcctgcatccatgaagtttccagactgcctgaactaattccagaaagatagactgactgactgatagaaagtttgagatttgatagtttgtctgactttagggaaaaaattttaacaaaagcatcctaaaatcgtaaatgtgagagaagttaccatctaggccagctgccagccatcaatttgctaatatgctaggaactcccatctccagcaaaataaagtgcaattcaaagtactcatcattgtacggaaagaccagaaggctgtgcccttatcacaggggctaccaaattagatggtacactgatgtgccattgcagtggatgggagagtctacagactgtactctcgcttatctcctgctactaaatcttagtcctagaggccactatttattaagttagtttgctacccactaagagtacattctaagggagacaacaggagggaagaacagcacaacaaagctttaactgtcaatcttgagccagtactagaacatagatgaaaagggcaggaatacaagcaaagaagatgcctgagtgcaatgcactagaatatacccctttccccccaaccccattagcaacttggagtcatgccagcccacccacctagaccataacctcattgtgctcaaagcaaacactagcccataacccagtgttttccatgataaaaacatgttttgagcatactgtctgataagaatggagacatagaagaaaactttttcatctaaaatgatttcttgaatagaatgcagttctcatatgcaagcattagtctgaagtgttctgaaaaatgctacatgtgaagaattcaaaaagaaatgctctttgttataattaggaggcttattatctaattctcttgaacatactgggtgaggatatct

SEQ ID NO: 80 - DNA, 3767 bp, Homo sapiens
cccccgccgctcgtccccgccgcggccgcgccgcctgcagcagcaccagctgctcctccccggcggccgccccccgcgggtccctccctggctgcgggagagacggaggtagagggaggacacagagccgcgccgcccgcaccacagaccttcgcctcgccccgccggttcctcaccctcggggagcaacatggcagataatctcagtgataccttgaagaagctgaagataacagctgttgacaagactgaggatagtttagaaggatgcttggattgtctgcttcaagccctggctcaaaataatacggaaacaagtgaaaaaatccaagcaagtggaatacttcagctgtttgcaagtctgttgactccacagtcttcctgcaaagccaaagtagctaacatcatagcagaagtagccaaaaatgagtttatgcgaattccatgtgtggatgctggattgatttcaccactggtgcagctgctaaatagcaaagaccaggaagtgctgcttcaaacgggcagggctctaggaaacatatgttacgatagccatgagggcagaagtgcagttgaccaagcaggtggtgcacagattgtaattgaccatttaaggtcactgtgcagtataacagatcccgccaatgagaagctcttgactgtcttttgtggcatgctgatgaactatagcaatgagaatgattcgcttcaagctcagcttatcaatatgggtgttattcctaccttagtgaaattactgggcatccactgccaaaatgcagctcttacagaaatgtgtcttgttgcatttggtaatttagcagaacttgagtcaagtaaagaacagtttgccagtacaaacattgctgaagagctagtaaaactcttcaagaaacaaatagaacatgataagagagaaatgatttttgaagttcttgctccattggcagaaaatgatgctattaaactacagctggttgaagcaggcctagtagagtgtctactagagattgttcagcaaaaagtggatagtgacaaagaagatgatattactgagctcaaaactggttcagatctcatggttttattacttcttggagatgaatccatgcagaagttatttgaaggaggaaaaggtagtgtatttcaaagggtactctcttggatcccatcaaataaccaccagctacagcttgctggagcattggcaattgcaaattttgccagaaatgatgcaaattgtattcatatggtagacaatgggattgtagaaaaacttatggatttactggacagacatgtagaagatggaaatgtaacagtacagcatgcagcactaagtgccctcagaaacctggccattccagttataaataaagcaaagatgttatcagctggggtcacagaggcagttttgaaatttcttaaatctgaaatgcctcctgttcagttcaaacttctgggaacattaagaatgttaatagatgcacaagaagctgctgaacaattgggaaagaatgttaagttagtggagcgtttggtggaatggtgtgaagccaaagatcatgctggtgtgatgggggagtcaaacagactgctgtctgcccttatacgacacagtaaatcaaaagatgtaattaaaaccattgtgcagagtggtggcatcaagcatctagttaccatggcaactagtgaacatgtaataatgcagaatgaagctcttgttgctttggcattaatagcagctttagaattgggcactgctgagaaagatctagaaagtgctaaacttgtacagattttacatagactgctagcagatgagagaagtgctcctgaaatcaaatataattccatggtcctgatatgtgctcttatgggatctgaatgtctacacaaggaagtacaggatttggcttttctagatgtcgtatccaaacttcgcagtcatgagaacaaaagtgttgcccagcaggcctctctcacagagcagagacttactgtggaaagctgagaactgcccgatacacggcatcatcccatctctaatttcccctctgtcctccatccagcggcttcttccgcttcattctctaccataccacttgtgcatgcatgtgatgttctaataccaattgaagaaccgctgtaggtacctccctaataagatttctaaacctatagttagtgtgatcatgactttgtcaaaggcaagtctccacccataaccgttctcttgtattcctgttgcttgagctacattaagtagaatgtgcatgttgtagtcctatgatgatgtaaacttggtactacataatgacttgctccacacatgcagtaaactacataatgatgtactggtaaactagaaacaaagaatgcagcaggatctgtctagcttattaaagatgaaactgaattggaaaaatagctccattttttggtgcttgggaagcacagtgaccaaaaaagttgtatggctgcttattcattagtctttcctactgatgtcaaatccatggtacctagagttaaataaaattccaatgctcttactctttaacttctggtttctcctttttcctttttagactattgaaactgccacaaacttggcaagactttctgaggtttctgattccatatttaattgactattatcaatagcctgatattgaaaaacatttgtagttttcagtgtgaaactaaggggttgaagaatcactattacaatccctattacagagcatttcgggttttgcttgtattttagattctgatacatacgctgtttcactcaggaactacttctaccagttaatcagcattatccagcacttgtctttaaaattcatttggcgcttgtttgttttcaactgaggaaattgagtatagttcattgaagaatggaatttttttttttttttttttttttgctgtttttcatcattcagctagaaagtgagaagttttatcttccatagtccttttaaatcttatgttagaactagcaggacgtaggtggaaagatgaagaaataagcttgtctagactaaagaaaggaaagcaggttataaaagccatagtagccagtccagttcattctgcagatggccccataccaatcgctgttagagtttgccacctccactttcccactgagaactgcagcaattttaaaggatatgagaaagccaagactcaagagatgagaagacccccttggcgaaatatagtgtactcttcactgccactgccaccaccaaatgggtttttagagctttgaaacacaatctttgtaaattaatcaaaacctccctgtgacccacctgccttctccccatacccaaatttgaccactactggcctaaaaggcaagatgggcttcgatatagaaggactgcaagacagtagaaagggctgccacggaggtgacagtagctccttcctctccaacatgtgatgctacacatctctgtggataatctaagttggacttttgactctaaaacagctataatccaagaaagttaaattctaatggaggtaaagaatcttgactgattgttccctttgatgtccaaataagggaactattgtgagtacgtatgctacacttactataagaatgatactgtttgttgtctttctcctgggctggatagtggactatattttattacaggctttgaaagacatctgtaatgttgcatatctgttcatattaataacttaataaatagtatatgaagctataaaaaaaaaaa

SEQ ID NO: 81 - DNA, 33115 bp, Homo sapiens
acgcacaagtctgcagctctccccaactttccgttcagctcagtctccgagggtgcgccagagcagacacccggaggagtggggagtggcagggcggggccgggagaatgctgccccggaacccataaatctgggccctgcccaggtaggccgggacagctggggtggcctgggccgagagccaagaaaagacaccccatctggcagcccaacttggcggcaacaggtggcccggcgcccgggggtctgggaggaaagtcgctccgggggcgggccccgttgccccgccgcgtccccattggtcatcaggtttcttaaaatgtgactctgaatctgtgtccttccgccgcagaatttagtcccaccgaaagggcaacctgcccgcgcgttccgccgccgccgccgcgcttcctcctgaaggtgactgcgcccgcggggacgcagggggcggggcccgggtcgcccggagccgggattgggcagagggcggggcggcggagggattgcggcggcccgcagcgggataaccttgaggctgaggcagtggctccttgcacagcagctgcacgcgccgtggctccggatctcttcgtctttgcagcgtagcccgagtcggtcagcgccggaggtgagcggtgcaggaggctacgccatcagtccccaccaagggccagtcgcccggctagtgcggaatcccggcgcgccggccggccccgggcacgcaggcagggcggcgcaggatccagggcgtctgggatgcagtggagctcagagagaggagaacggctcctcacgcctggggcctgctcttcagaagtccccagcgccgttccttccagatcaggcgggtccgccggctcctttcccgccccagccctaccccctcattctggtcccatcctcttcctcctgccccaatcctcaatgcgcctccatcctcgcctgccttctctcggtccctcgtgattgattccacccttgcttcccctttctccgcgccgcctgttccgtgctcgttttcccctcttcctccttaagtctggtccttccaccccctcctcttcaagctgtgcgtgtcccctgattctaatgctttctgtgtaactcattgaaactgcgttctggttcccctcccgcgtccattctccattcatgcgcgaccgcccttcccgcgccccagttccctctcgccgcccctccccctgcttgctggtcacgtccgctcccccgcatccccttcctcgcctggcgtgtccgctccctccctccctctctgctctggtcgcgcccgcccacttgctccggtctccgagcgcggtcccaccccccttttccatcaccgcctcccagctcccagcaggctcgggcggtgctgaggccccgtgtccggggcgggcgggcggagggctgggctgggtgccccgcgcggcgggcgggatgcggcggcccgggggcagctggagacttacgtaacgttggcctgccccgctgccgggaggcagggcggttgcccctgcggcgcggtgccgtcccctgtggccgggattagatgggcggcctgcgagggcctgggaatggctcggggcccgagagctcgaccggcccttgccgggtggccgccagggaccacgctccatctcgccgcggccgggctgcacgtagcggccgcgcccagggcccaccccgcttcaccgggcgatggccttgggcctcgtaacgggcgggataaacctctgcaggctttgctggggcctcctggccctcgcccgttccgcgcctctccggcacgtttctttcttttcctttcttttttctttcttttttttttttttaattatccggcacattttttaacaaatgcgtcctgattgtggaacgcggaggccgcggggtggggtggggatctggttacggagggggcaggaaatctgtcgcgttcactgaacgcaaacggtgtgggtcaagggctgtttgggggtcagagttagagaccaggatgactagacgagtcatagcccaccgagctcacaatcttaaaatgtatctcctgtaatgctgggagtggggtacgagcttcctgctgtgggagggagggggacaggaagcctcgtaaggtctcaccaggtggcaagcacactggattagaagatgcaggaaagcaccttccagtctgaagatcatttaaagactcagtcatgtaagggcatcccttggcttcttaatctacgtactccagacccagggcttggacctttgctggtacgggttaaagtgaggccgacagtgaaggtccacgtggagagagacattgggaagttgtcaaaaaggcgtttagaatcaggtttgactcattaatttcctgagactctgaaggagttcagcctctacacctcagtttcccctgggaaaactgggagtaacattttcctcatgatggttgaaaggattcatgcttacgtggatgtggcacactcagtaagtgtctaatctctggcgaaatacccagaagaaaagcctgtgactgaatatattatttttgagcacaattacttagtccacaattgagcataagggccttgatccattgtcttcctactgtccccaaacgcctacagctaatcgtgaggaatcaggctctctgaataaccacgtgtctcctggaaaccagttccccaagggatctggtttaatattgacaaagtaactgataatgtaactttccaactctctgcttggagcagatgctttttggtcatctgagattgggacctgtagacaaaggcaggcaaggaggggctgagttaagcctttggtgttccgctgtaagtagaatactacctaccagaggaacattccagcccttgacttgctctgcctgctggtgagattaggattggagccagggtcagtagcccccagttggccgtcttgagggtgtggccactccctaggtcacagaggagatggaggtcaggactcccctgctgcagcgttgttagcaaataatttgccctttggtggcctgaggtgctgtgggggcaggagtgggctgtcttgtggggaagggaaatgtaacgtatcaccaaatctgtgggggagtggggctctgtggggaagatgactcaacctttcaattattctgcttttgagagaattatcttcgctgggtgagtggggaaactacattgtggttcttgcaggcttaaaaagtcccttctcccctttcagtgagtcagataatgaagcatgcatttcccctaattaaaaatgcctcaactacggagcttgcagtgagccgagatcgcgccactgcactccagcctgggcgacagagcgagactccttctcaaaaaaaaaaaaaaaaaaagccacaactaattaaaaaatgattggtccgggtcacctggttctctgtactgccttaagagcttaagtgtagactggcagagcccggtgcccagctaatgccgtctgtgcagcttcattcctggcccttttgtagcgggcacagccgcctctcctgggacttgattaatgatgacttaaagaaggttcttgaactcatttctcagttactgacttgagccaaaatgtatggatgttggtctcctgtctagcacaactgctttcattttaagcattgcattagaaataatgttgtattcatattttagcaaagagcatcattagctctttaagaaccgtacccccagtgacttagcaaatttggtggcggtgactctaaacagctagcactttatgggagttgcttctgtgccttgaatgttgtgacactgatgtggggtcacaggaaaaaccattttatttcctaaagctgtttatttcttaatattgaggcaatggaagaaatgaggaaacggccgtgggcaggaaggtagaagaaaatgcagcacttacattacaaactcactttacttgggttttagtttattttgcttcagttttttgttttttttttttttttttttttttttttttgagatagttttgctcttgttgcccagtctggagtgcaatggtgtgatctcggctcactgcaacctccacctcctgggttcaagcaattctcctgcctcagcctcccgaagtagctggaattacaggcacttgcaccacgcccagctaatatttttgtatttttagtagagatggggtttcaccatgttggccaggctggtcttgaactcctgacttaggtgatccaccggcctcggcctcccaaagtgccgggattacgggcgtgagccactgcacctggcctgcttcagcttttatgaaggcaagtcaggatgtgttatcttggccaagagctaagactgagaccggagtagaggaaaatgactcatttgacattacccttctttctgaatcactccaaaagtccacagtcaaatctcaattagctggtataacacaagaatgcgttgaccctgtgagcagagttttattgcatcttcaagggtcttcgtgagattggtttatttggtatgaggtcttaaggattttaagttgtccctttaagcatcagttctgatacagatgggaatagagctaaacaaccagatatatgaagaccatttttgataccaccatacttgcggggagcttgcatttttttaccaaggggcagactggataattgagtaatttaaatacttgggactttgttaaagaagctgttgggggaaggtgagcctgggtgagtggtggagggtgatgtgcagcatctgctgggccttcctgcctcttggtatgactgctcagctcaggagttgggtgctttagggcccctaccatgcagtgcggtgaagccccgcccctgcagtggtttgtgcttgtctgcacgtaggagggaacaagccggctgcagtaccttcggtggcctctgagactcacctcccccacttctgtccatagacaaagctcctggggagccctaagcctctttcctcatgccagcaagcagtcttggaagcaggctggggctgcagtgggagagatgccaagaccagttattcaagggcagtgaggttgccagtcctagcatttcacactgtggaccagcacagctgctggctgaatactgcagtcaagattctctgaagggagtcctatcccttccaaacatcttcagtttacttgcagataatgtttcttcattttttattttattttattttattttatttttttgagacggagtctcgcaccatgacccaggctggagtgcagtggtgcaatctcagctcactgcaagctccgcctcccgggttcatgccattctcctgcctcagcctcctgagtagctgggactacaggcaaccgcaaccacgcctggctgattttttttgtattttttagtagagacggggtttcactgtgttagccaggatggtctcagtctgctgacctcgtgatccacctgtcttggcctcccaaagtgctgggattacaggcatcagccaccgcgcctggccatgtttcttcaattttaaacaactgatatctcccttggccatgaacgaaaaagaactgcccatcagtggagtcagtcagggcacataagacacactgtgtccaccatgccatttcagaggagatttgattgagttaagcagggaaatagagatgttgtaaacgttgaaactatctgggtatccctctttggttattaacattagatgagcagaaaaacaaatgtcaccgatgggcaaacatttaaaaagtctggcagtaccaagtgtggaaaaaggtgtggaaggcagcaactcagcgttcattgatatagccactttggagagcaattcagccttatttagtaaaaatagaaataaacatactccatgacctaagacttcaatttctggatatatagaaactcacacagtacagggagacatgtactacaagagtattgattaatagaagaaacttagtttaacggggagggagagtggccaccagtaagacagtccataaataaaatggtctgttgtacagtggactagtgtaacagcttaaatgaattagctagatccatatacccactggatggatcttaaatgtgctgctgagtgaaaaacaagttactcagtgatatatacagtataccacttagggcattaagaaaaccacaatattatagggttcagtatagacatagatacactgtacatagacttcagtgaactggaaggatatagagttcatgacagtgattgggtgtcaaaatgcatgatgtggctgggagcagtggctcacacctgtaatcccagcactttgagaggctgatgcaggaggatcacttgaggccaggaggtcgagaccagcctgggcaacatcgcaagattcccatctctatttaaataaataaaatagaaaaaaaagtttaagatggaggtggaaagggttggaggagcttggggatggagaaaaaatgaactgtataaaattaaaattcttgtttttgtttttagaaagtaaagagggccgggcacagtggctcatgcctgtaatcccagcactttgggaagctgaggtgggcggatcacgaggtcaggagattgagaccatcctggctaacacggtgaaaccccgtctgtactaaaaatacaaaaaaaaaaaaaaaaaaaaattagccgggcctggtggcgggcgcctgtagtcccagctactcaggaggctgaggcaggagaatggcctgaacctgggaggtggagcttgcagtgagctgagatcgcgccagtgcactccagcctgggcaacagagcgagactccatctcaaaaaaaaaaaaaaaaagaaaaaagaaattaaagaaaatacagctcagcctttatttgtgtttttttttttttcctttttttctgagacagagtttttcactctgttgcccgggctggagggcagtggtgcgatctccgttcactgcagcctccacttcctggattcaagcaattctgtgtctcagccacccaagtagctgggattacaggtgcgcgcctggctaatttttgtatgtttagtagtgatggtgtttcaccatattagccaggctggtctcgaactcttagcctcaagtgatctgcccgcctcagcctttcaaactgttgggattacaggcgtgagccaacacagccagccatggctcagtgttaatggtcagttctgggtggtagagaggcagatgttaaaacttttttttctttaattcgtaacatagaagcaaacctataaaggctgccgtaggaagaccagtcatagtaactagttcagtgctcttggagagttggcactgcctttcctcctttatccccccgactagaatgcagggcagcccttccagtaaatgttgagccagtgcctcactttgctgaggccatcacccaccttagttgcacttaagaggaccctaaatcagggtcccaggtcccttgctgattttagagtgtggatatcatacccagaaacaccgccctacttttaatcctagtaaggaggcaccatgtcccaggacaactaatgcttcccccaaaccacctccttcaggctgaaaccagttctctgcactgagcagctgggatggaaccaggaaatcctcggcatctgaggacattgaggggtctctgacttagggcttcttcacctgaagttgagtggtctttgagggaagtaggcccatttagcatcagctgctcttccctattccacactctagttggaaataggaccttaggttcctgttgacaagtcatttactttcagccccgaagaaataaaagagccaagattttttttttttttttaaagccagggaattttactagaacctacaagtgggctcattttgttctgtgtagcctggtaacaccatactgctttctgctgtggggcctcctggggttaaagtgtgggcttaagacccaggtctcttagctagaagatatcttatcctctgtatcctgcacccatatgcaaatacattattgtcattacccttaactatagatgaagatgaacagtgcctattccagaccttactaggttctgctggcccgtcacccattttgatcatgttgctggcctagtttgattagggcaaatcttagaaactccatttccattgttgaggaagagaactagagagcaggctgacctgaatgccagcgtatcatgatgcagactttctaacggatgcaggtgttcggaagagttgtggatcgaaacgccttcatgatggcttggaggtgtaggtagcaaactgacgtcacaggaaggaacacaatcttgggtacctactggcaacgttggagggagaaagtgagcatcaggtgccatcattttatagttgatctatgtgatgaggttggtatcggagcataattggtacaaaggaaaaatgacttaggcagatgcagactcacgggccaggctattttattagggcagaatgatttggtcctttgtggaagaattggtggagtgaagcgtgaatctttcccagcacaacccaacaacagtcctggccctaagaagtggagcatgggagttgggtgtggttcgtgcctgtagtcccagctacttgggatgctgaggctggaggatcgtttgagggtgcagtgagctataatataatataatcacaccactgcactccagcctgggtgacagagtgaaaccctgtctgaaaaaaaaaaaaaagaaaaaaaaaaagttggagggaggagtgttgggtattttttatgatttttgtctcctggtttctgaagaatggccaaaaaattgtgtctgacacaaaggaaactaatataaaaagccaggagctgtctgagatgagaaaggaaagggagaatagggcacttggagctgagctgtgattgtgcctgttccaacctgtcactccagactaaggcctcttagagatggtgtctcctttctcacagaggagacatggctctgaggaagatcttactgcaggggctcgggctcaagaataaggctcctggacctgggcatggtgtgtgctgctatcagtggatacgccaggcttccactgctggctggaggttggctctgcatgtctgtgccttcctaggaggaggatgcaatagtgagtcagactggcatgggtggggccacatgtcctggcaggcactgtccaggcagctggcatgagggagaggagtctttcccagaagtccgccctgagaaaccaaggctgggctgctctcctggagccaggggagtccagtgagtgttttacatacaactctaggtacgtggttggtgggatgggcagtttgtgctgggaagaggcttgtggaggattttggagaaggcaggagagctctggccctccctgcaagggaggcttcaggtcagagcctgaggaaagacctgggcatgagatatgaggtctctggctgggtagagagcatgaaggacacatgagatctggagtctggatgaacttgctgacaagcaagctttttttgactgctaatgcgtaaatccactatagaaattttcatttgtcatttttgtacttattggcaaaaaattagagcttataggcatcagatttaatttgagatagttgaaatagggtttgtgtttgaggccaatataattttatctgctaatggcatctcgtggacttggaggcagcccttctgtaccagaacattgtcaaaagcttttactgtaaagcttgagaacaaactagtttgctggatttgggcatgtaactaacaggtttgaggcatgggattatcctgtggacttttttttttttttttttgctttgaggttctgaatgtattaaggttgaccttcttaagccgttgaaactgttctgcagtacatttgtgatgtagggcctaagacttgtatcgttttttttttttaatcacaacccagtgtacagaacttgagacatgcgtcttttctctgccaccttttaaaagcagattattcttgaagtgcatagagcagcaattgattaatggaattggtgtcttcacatttcatttacttcctcccaacaattttataggatgcatataaatatttccaaaagaggtacacataatttcttactataaaagtatttttatatttatatcagtaaatttgttaataaagaggatttttttttttctgtaatcctaccaccccaatgacgtcctattaaaatttcagtatatatcctcccaggtcttttaggtatgtttaatttggtgtcccttccccgctcccaaaaggggagggaccaggttcttgtatagaatagtggaatgttagtaaatcacaggtttaaagagacataacagtggaatctctagagcagctgtcacctggatacctggttattaaggtaatttttccattaccccaaagagctttagttacactcagctttttccttaatccttgtgcagctctccagggcacaccgtattcagctctgagcggtctttgctagtgaggccaaggagccaccctgagccaaaaggggagcattatgtcaccggaagcccaaccccagagaaccaaaggtatgacctgatattcagtggccccagccaggtctttacaggaagaccctcatatctcaggtctaagaagagccagctgatggtttttaaaaagagtggaattagttactccaacccacttattcagatcttattttgttcacaatacagtccctagattgtaggcccattggaggccacagcaaagcctttgtgttccagttggcctgatgtgccatctctcagtaatgttcccttaacagccagacttccctaagcccagctgggagctctgaaggtatgcgagccctccctcaaccatgagtgtagggaaagggaccaggggccccaggctttcctgtcagtaatgcagaagttcctcagatttagggaagggggagcagaggcataactttgattctgacaaagaggcattcagagagactgaaaggtcatttaacaaacactggaatgcttccacatactaggtgctaggagatacaaaaccatataggtcctggaagggaggattgattttttcattttggtacgtagtagatattaggggcttaggaaatacacatcgaaatgaagagtgcatttgccatgttgaaccgttagccggtatcttatttccccattttaaaagttttagaatctgtggttgaggacttgtggccatcagttttccatagccaacagactgttcactactgccttcagagctccttggacctcagcgggccttctttggagatggcagagatggatttagatgtatactctactcgagccacccagagagcccacaaagtcagagatggaacagggtaaaggagtaagggtcatatgtgtgagatgccttgatttggaactttgagatttaggatgaggtggggaagggctaaagaggagcttgttcctgagccttgcttggccgaagcatttaggctcaagcgttttagaaagagtagcccttggtctgagaactcaaggaaacagctttctgatgagacgtgtagcaagcttctggttcacatccttacctgatagttcttcaaacactgcctggtctggttcacatccttacctgatagttattcaaacactgcctggaagcttctcctgagtttttgtctctaatcagctaactaacaggctgagtgagtttagttgtaagtcattaatgaagaaagcaaaggttggggccattgtcagggttgtgacctgggctagttaattacctggaactgatggtctgtgttacagagtggtggtatacttgtcaggcttagaaaagaaatcaggatgtgtatcaaaaatcatttggggaaaagatttgaccagcaactttaatttctctatgtttgcaactatcctgttaatgtagttgtgataatttcagaattataccagtgcccttatgttatccttgctttgcaaattgcaaattgctttgcgtgtcctgacatccttctggccaacagtagatgtggttttaggtttagactcctgggatggaagcttttgcattcaggggaatgactttgggtttgggtgaggattgtaaagaggcaatatgggtgccccacgacaaagcagctatttgtagctttgtgacagcttgacatgcagagatctaggcttatcaaggcactaagctaggagtcagttgtttgtatcactggaagattggttacaacttccttcattggaagctccttcagtgcatgttaaatgatgttatttatagatagggtggtgagaaagctgtctaggtagatgtcagtcagcccagtgtaagagagacctgcttactgtgggtgcttgggactatgtggagtgggtgggaggttttaacttgttcagtaaggtcctttccattgttcacaatctggtgaaccctttttctaacatgaggagcacccacataaccagatcatgtctggcttccctgtggcttgtgtacaaagcgtgcttattgagttaatgtgtaagcaggagacagccttctgtgctaaatggtatattaaccacttctcagtcttaccactctctttcaatttgtctcgacccaggacctcagcagccatgtcgaagccccatagtgaagccgggactgccttcattcagacccagcagctgcacgcagccatggctgacacattcctggagcacatgtgccgcctggacattgattcaccacccatcacagcccggaacactggcatcatctgtaccattggtgagtgggtgtgccccttcccccaaaaaagggcttcatgggcagtgacctttctctcctgaaaagagtaactaaatgtcctaacaaacctaggtgctacatgggatactacacagattcttatgaaaggactcaggtcataggaagttgcagtaaagaattagtatgtgcataggatggcaaatacagttaataagagagtattagacatttcaaaattgctaagatggcgaggtatggtggctcccagcactttgggaggccaacgtgggaggattgcctgagcctcgaaatttgagaccagcctgagcaacttagaccctgtctctccaaaaagtgaaaaaaaaaaaaaaaaaattagctgggcatggtggcatgcacctgtagttctggctacatgggaggctgagacaaagatcacttgagtccaggagattgaagttgcagtgagccatgatcacaccactgcactccagtctaggcaacagagcgagatcctgtcttaagaaaaaaaaattgtccgggcgcagtggcacatgcctgtaatccagcacttcgggaggctgaggcaggtggatcacctgaggtcaggagttcgagaccagcctggccaacatggtgaaatcccatctctactaaaaatacaaaaaaattagccgggggtggtggcgggtacctataatcccagctacttgggaggctgaggcaggagaattgcttgaacctgggaggcggaggttgcagtgagctgagatctgaccattgcactccagccttggcaacaagaacgaaactctgcctcaaaaaaaaaaggaagaaaaaagaaaaaaacatcgctaagagtaaatttcaaatgttctcaccacaaaaatgttaagtatttgaagtcatggatatgttaactaacctgatttaattattccacattgtatccaaactgtatgtattggattacataactttgtaacccaaattataaattaccagtttataataaaaaataatttgttgcaaaaagaatccatatggtttaggttttatgctataggcaaaatttagaagatgttttccttagcaggtctttgtaggagcaacttaaagacctaggaaagatctttctaacatgttctgtgctaccaagattctgtggttggacatctggctgggtttcagtgagggtggagaaggctggccaagtcttaacctaggcttttctgatacagtgggagcctgcagaacttgaaggaaatggtcgaagtgtcccagtagatcaagaaagtaagctggcacggtagtagccttccatgcactttttaaagacttttgagctatttgggagaggaaaagttttcagggaaaaaaattctttaaacttaagcaaacttaaatgtttttccttctttgaataattaatacttgtggctttaaaacttttcctaataggcccagcttcccgatcagtggagacgttgaaggagatgattaagtctggaatgaatgtggctcgtctgaacttctctcatggaactcatgaggtgagctgtggctggaccctatggccattgtgatggcctgtaggaaacagggagggggtgcagtgttcgtttagccacagtggactagacaaggatgagtctgagtttcacagtcagtgtgaagtttgtctttactagcccatccctactctccttccctcttgtcctgacaaagcaactggctgagtctcttttagcaaaaaggaccccctttgttgctggctgtggttctcccacacacctctcctacccttagcttttacaaaggaagatatggaaaggttctactggaaaaccctctaagccttaggtgtcctggccacagcgcttgactctcctgtcccagggtttctgcttcaccttgtgttgccatggtaaaccatctagcagattgattctagcttagaaccaaaataactgggcaggtccatgagaacggtttccactattctaagttttgagggactgagcctaatgcataagcactatctggggtgtaataccccacttcctcagcactgtattctcagcctgtgccttcccaggggttctggtacattaaaataacaccagttagcactcttccccaggagcctagtaggactgtatttgtgctgggctctttattagctggctttacctatggacagaggccttgcccaggagccaggtagcagctgttgggatggctccattcctgcctccattgccagatttagaattaacccattctgaggagcttggggttccctgaggtaccatgacttatttatttttttattttataaaacaaaattttgctctgtcatccaggctggactgcagtggtatgattatggctaactggatccttgacctcccaggttcaagtgatcctcttgcctcagcctcccgagtagctgggaatacaggcatgcaccaccacacctggctaatttaaaaatttttttgggggaaatgaggtctcactatattgccttggctggtctcaaactcctgggctcaagtgattctctcaaatgttgggattacaggaatgagctaccatgctcagcctgggattgtgcctttttaaaaccttcagacttaaccataggtttcccatagatcatgggatttcgtaatggcattgataagaggaattacagaagaggcaaactttgcacctgtcttggcttctgtatttcctgttgagagtaaagaaaatgctatcctgtaaggccaattgccttacagaggttgccctctggcatttggaagttggtattaagtttggactaaaaataaagcctcaggaaatgcaatccaagagtgaattcctccttttgggaaacacaagactcttcatcatagattccctaacctgtgttcataaacagcctatggcctggctagtggctggcccttaaatgtcatggggacctgaccaagtccagcagacataccatgtaggttaagacatgtccctgtaccttttggaaaattctgtagttttccaaaagcaaggggtccttagcaggagtcaccgagaattacttgttagagaattaagtgttagcttagcttagagagagctgaagacaatgctggaggtctgttcgctgttgatccctgctgctgtagtctgccatgggctcctgcattcaggggaaggagcagaaatagatttttaagaagttgacctttaagtaggctttatggttccttcatccagtaaaataacaccacatagctctaacatggcaagggcgagtgatacctgccacacctgctggatgagagctggctccgattttggtattttaaactttaagaggcttttggagattatctctactttcactcctattcccagattataattaagatttattttttattttttatctatttattttttaaagatgtccctcttgtgtgttcattttgaagttttagaccaagatgaggttgtgtgtgggctcagcttggaaactgatctgaaattattctaatttatataatgtaatgtaaacagtttcagccttaccatacgtcagggctatcgtttcatgtgcacctttgactaggggctggggcgtacttttccagtttctgactattttaaatgctcttctgagcagaacgttgagattactgtcttccctctcactctgacagagggacatcaaatgtctgcatctgatcttttaacagctttttttttttgagacagaatcttgctctgttgcccaggctggagtgcactggcacaatctctgctcaccacaacctctgcctcccaggttcaagcaattctcatacctcagcctcctgagtagctgggattacagacctgtgccaccacgcccagctaatttttttatatttttagtagagacggggtttcgccatgttggccaggctggtcttgaacttgtgacctcaggtgatccgactgcctcggcctcctaaaggcgtgagccaccacgcccagccctcttttaacagctttggcaactagtcttcagccctcacttttggcagttcacatgggcaagatgcattcttgctgaacatgtggttccatatgccatgttttccagatttatttatttatttatttatttatttagagagggagtctcgctctgtcatccaggctggagtgcagtggcacgatcttggctcactgcaacctctgcctcctgggttcaagagattcttctgcctcagcctcctaagtatctgagattacaggcacctgccaccacacccgactaatttttgtattttagtagagacttggtttcaccttgttggccaggctgatctcgaattcctgacctcaagtgatccatccgccttggcctcccaaattgctgggattacaggcgtgagccaccacacctggcctagaaataatgacttttaaacaacctaaatgtagagccttccacaggacagcattgatggatgctttaccacataacatcccaataaagccacagctgaagtggaagactcagtacacctcccagagatgctctaagagattatgatatatgacatagatttgaataatatacctaataattggtatgtttataatatatggttttacatccccaagaccaaaaatgcatgtttgcatgaaacactcatggttacaaaaatatattaggccaccaaaaaaacccccacgtttcataaagtagaaattatacagacacattctctgataaaattttttagtggaaattaagaacaaagtcaagaaaactgaagtgtgcttactttagaaagcaaagatctcaaggtagatgaaataaatatttaactcagaacactaggggaggaaaaccctaaaaagggtgaagaaaataattttgtaagattatagctcaatgaaatgaaaataaatttgacagattaagctaagagctgattctttgtggggaaaaaatagtaaaatagaaagttctgagaagccaggtgaagaatgcgaggatgtgcaaataagagtatgaatagaaaagagaatatttcctacacattggagattttaaaagtcaagaaagacttataacttaattcctatatagagagatgactctggctattttcaaagaaaagataaatatccaaaagatagaaaatatgaatagaccagtggccataagaagttgaaaaagtgggctgggcgtgcggtggctcacacctgcaatcccagcactttgggaggccaaggcggagggatcacttgaggtcaggagttcgagaccagcctggccaacatggtgaaaccctgtctctactaaaaatacaaaaattggctgggcatggtggcacatgcctgcagtcccagctactcgggagcctgaggcaggagaatcgcttgaacctgagaggtggaggctacagtgagccaagatcgcgccactgcactccagccaaaaagttgaaaaagtgattaagatctggttcacctcagaacacttaagtccaaatgattttagtggctgaattgtctccccttcaaagttcagttacattgttaaactgttccagagcctagagaaatatagaaatcttcccactgtgttctttgaaaccaatatacgctgatactgagatcaaacaaggacagtaccaaaaccaggcaggtactaacagttagtgtgctagaccagtctcacttagatgcagaaaacaaataaaatttaataatccaaatccagtagtgattgaaaggaatgtcttgatccatgaccaagtagattttattctaggagaacaaaattctacatcgggattaagtagagttaaggttgacatttttttttttttcttctgagacggagtctcgctctgtcacccaggctggaatgcagtggcacgatctcggctcactgcaacctctgccttccgggttcacaccattctcttgcctcagcctcccgagtagctgggactacaggcgcctgctaccacgcccggctaattttgtttttgtacttttagtagagacggggtttcaccatgttagccaggatggtctcgatctcctgaccttgtgatcccccctcctcggcctcccaaagtgctgggattacaggcgtgagccactgcgcctggcctgagttaaggttgacttttaaacaacctaaatatagctaaatatagagccttccgcaggacagcattgatgtgtggaactcttatccacgtgataacatcccaacaaagccacagctgtagtggaactcagtacacctgagtcttatcattataagatgataataggtaacatttattagataattaccatgtactttgtcctaatacttcatgtattcttttactcctcacgtcaactctgaaggaaaggcaccacctatccccttaaaagaaaacaactattactattcttttttttttttttcttttagagacggaatctcactctgtctgtcgcccaggctggagtgcagtggcacgatctcggctcactgcaacttctgcctcctaggttcaagtggttctcttgcctcagcctcctgaatagctgggactacaggtgcacgccaccacgcccagctaatttttgtattttaagttgagacgaggtttcaccatgttggcctggttgttgtcaatctcttgatctcatgatccacccgccttggccttccaaagtgtttagatgacaggtgtgagccaccgcgcccagcctctattctattctattttgttctatttctattacaagccagtaagcaagaaaatatcataatttataaggaaccctataaaaaacagacaagccaagggtctgtcattaggaagtatgcctgaataagaagctgaagatttttagacacaggtttcaggcaacactgtctttagaggctaggctctggctccagctccctccagcctcctgtgaataacaggcaggcttacttgcaggtgccactttcctggacagtggtggttaaaggacaaggcccagaaagtgctgaattaggtgcccttgttaccgctaatgtcttattgatgacactatcttagagctcttttgacatcttggctctgcgtcttttttttttttttttcttgagatagggtgttgctttgttatccaggccggagtgcagtggtgtgatcatggctcactgtagccttgacctcctagacataacccacctcagcctcacaagtagctgggaccccaggcacgcaccatcatgcacagttaatttttgtgttttttgtagagacgaggtttcgccatgttgcccaggctcatctcaaactcctggcccaaactgtcctcccaccttagcctcccaaagtgtttggtttataggcatgagccactgtgcttagcctgagtccctcttttaaacaaacaaaatggtaaatggaaaggaggaaaggcttaagaaaaaagattgaagccaggatttgttgtaagcaaggagtaataaagggcagttcatttagagaaaggcatatgaccacctttccccctccaatcagaatctagaaagtgattgaggccgggcgcagtggctcacgcctgtaatcccagcactttgggaggccgaggtgggcggatcacgagatcaggagatcgagaccatcctggctaacatggtgaaaccccgtctctactaaaaatcgaagaagttagccaggcgtggtggtgggcgcctgcagtcccagctactcgggaggctgagaggcaggagaatggcgtgaacctgggaggtggagcttgcagtgagcctagatagtgccactgcactccagcctgggcgacagagcaagactctgtctcaaaaaaaaaaaaaacaaagcgattgagaaaatcaggtctgtgtgaccttagcaatgagttatttagcttgggccactgttagcttaagtcaataacttcaagtttgcgttgtagttggaatcaatagaggaaaagctctcagcattaccacatatatcagaatgtgacattgattgccagaccagccttatccaaacacaagtcctaggctttttgccctgtttatgagctttatatgctgagggtatttgatgagtcttagggaaaaaagaacagccctggggacacagctgcttttatgatgagacatgtttgcacccataccttaatgggttttggtggcaatattctgaaatttgccacctacatttcaaagatttgccctttgggtgaattagtgctgtagtagaagtgggtggaggctgaggaggttggattaagcaggtagaggatttctcagtgcatggatcgtgctgaggatggagatagagctctaagacatccacgggcctttcctgagtgatcagctttggctcctgggcaggggaattggagctggattctagtgtgggagcacgcttgtcatcttccttcttttcccccagtaccatgcggagaccatcaagaatgtgcgcacagccacggaaagctttgcttctgaccccatcctctaccggcccgttgctgtggctctagacactaaaggacctgagatccgaactgggctcatcaagggcgtgagtattctgcggagagcgaggggaaggctcagtaggcaatatgccccagagacatgtcctccaaagcgctgggttgccatgtttcttcccagtactatgaaggactgcagaggagttgaggtctacaaatgaggatttattcatcactgtaaacaatgttgatttgatctactttgctaggaaatggtaccacaaaggaaccttttttttttaccctaaaaacctaaactttaggctttctaacttggagaaccatctctttgtatctttttccccatcattaagtagcataactgaaacatattcttttcttggattatttccgtgaagtatacagagttagagaataagagcaaaaaactgtattacttttagcagtgacttgagcattgttcccgggaggaaagagcttttccattccttctgaggtgatgctgctactggtgtctccagtttggactcttgcttactctcttgtccctagagcggcactgcagaggtggagctgaagaagggagccactctcaaaatcacgctggataacgcctacatggaaaagtgtgacgagaacatcctgtggctggactacaagaacatctgcaaggtggtggaagtgggcagcaagatctacgtggatgatgggcttatttctctccaggtgaagcagaaaggtacgtatgggagctggagtccagttgtctaaaacagtcttttgtctctaaacttccttgacacaaggaagatgggaaggttggttgcctggcagtgagattgagtctgtgtgttctcaggaatcccttttataactcatttatcctcaaagataggctttaatccagcatagttacattcttctggttctggagaacacaggaacatacatacatatatatatatatatacatatatatatatatatatatatatatatatatatatatatatatttgtttcgctgtgttttgttttgttttcaagacagagtctcgctctgttgcccaggctggagtgcagtggcatgatcttggctcactgcaacctctgcctccagagttctagctattctcctacctcagcctcctgagtagctgggattacaggcacccgccaccacacccggctaatttttttgtatttttagtagagatggcgttttgccatgttggccaggctggtctcaaactcctgacctcaggtgatctgcctgccttggcctcccaaagtcagaacagtcttaattatccttatttatgggtgaggaaagtgaggtacagagaggttaaatggcttgcccaggattacacagtgtagtaggttttcaactctggtaaaacagctccagcacccataatgcaccacttcccagctcactgtccttgcgggaaaggtgcctgcttcctgttgacctgtgccctcgtgctctgcctcccctacttaccctttttcatacaggtgccgacttcctggtgacggaggtggaaaatggtggctccttgggcagcaagaagggtgtgaaccttcctggggctgctgtggacttgcctgctgtgtcggagaaggacatccaggatctgaagtttggggtcgagcaggatgttgatatggtgtttgcgtcattcatccgcaaggcatctgatgtccatgaagttaggaaggtcctgggagagaagggaaagaacatcaagattatcagcaaaatcgagaatcatgagggggttcggaggcaagtccccgttgtccctgctccagtcccagcgcagctctccgaagggcatggtccatcctgtgaatgtctgattcccagcccctagcccatcagaatgtagactcccaagccagttccaaacctgctgaatcagaatatcttaggagagtagaaggcattatgtttttttgtttttgtttttttgttttttttaaaaaaaagcttcccaggtaattgagatgctggcagcttgacattgttccctgggcctggggaccaacatttgagagaacagggtcactgctcacaggaccaggggccatgatgttctgttcctgatcagaaacactaccagtgtttgctggaatggggggaccagggggaaagatgacagcagacacttaagaaagggctctttttggcccttcctggggagccatgtggaatttcagggcctggtgtccatgttaaagcttatggcctcctggtcttcacttagaatgcagctggctcagtgatcatgctaactctggtatggtccattccactctcagaggaagatgtgtggttcttctccagtttcagattgccccaacttagcttaccccctccccaatgctcacaaagtagagcccagtgggcatggccaccatttttggcatcctgctaggaatacaactcagcacaactaagatgctagacacactcttgtggattagaagtgtgtttggggagggtgggggagcaaccctgtgcacccactgtagtggccttactgtctgagctttgtgtagatatcctctgtaccaggcaatttggggtcctcccctttgccatcctgataagccataggctagctgaacttggccctaggccaggcaaagccacattccctcttgccttcagcaggttggagtgggccacctcaaagggcagtcctcaagtgtccttgactagatgaggccatgggtctttgtggtggaagcagtcatcaggcctcaggttccctgtcttgaagtgctgattggaaaatggaggccctagagagacccctaacatgcatgggatttggagaggagaccttgggaatgagcccatttggatttgccctctcccctttcttccgtcaatgaagcatccatattggtgttgaagcccagcaggcagaattgttggcccactctgggggcctaaggtagctggactgccttgccatctgtgtgcacccatgatgatatcatggatgtctgtcctggtacaaggacatctaagttagggaatcccagggaaacttcttgtctactgccatacttgtggcctctgttctatataacctctctccccccaactttgtccatcaggtttgatgaaatcctggaggccagtgatgggatcatggtggctcgtggtgatctaggcattgagattcctgcagagaaggtcttccttgctcagaagatgatgattggacggtgcaaccgagctgggaagcctgtcatctgtgctactcaggcatgtgcccacccttccccacattctcatgtgcacactcgcatgtttgtatgggaaagctctggaggctgtctgatctcttcccatggaattgtcgcacgtaacacacagataatccccttcccccatgtacctacacaaagccatactctgtgtacctactcactatccagaggatcagcttgctgtcatttgtctctgaagacagctcaagctacatctcactaatgctctgtcccctcccagatgctggagagcatgatcaagaagccccgccccactcgggctgaaggcagtgatgtggccaatgcagtcctggatggagccgactgcatcatgctgtctggagaaacagccaaaggggactatcctctggaggctgtgcgcatgcagcacctggtgagttctggggcctgccccatcccccagggcttcggactgggcctgggatggatgcaagctctggtgcagagctttttaggtttctccatcctcttatgcacagcctttcattatcctccaagttacagcagcaagagggtgggggtggaagtggaggtggcttttttttttctcctgttctgcattcctgcccacacccccacccctccatttccttctgctctggaggcatcctccttcattggacaccacacagtttatttcacttctgacttcaaggttgtgaattcttcccatggcttaagtcctgggatacttctgcagtgaaaggaggtcttgtacctcttcctcagagtcagaagttctgagtacctttgccctattctgaaaagggctaggggctcctgctcccagctgccctcttcctttggcttccaattcagttccctctgccccgcatcctgcagacaggcgctcccgcagggggcccttgtggacctgcactggagtctgttgccttcactgagctgcctgtgctggccttgcatggtgcctgtagggggatttgctttgctgtgccattggggtacagctgctgctcttactctagaccaaaaagtcgggttgagtgactggtggcagggccacagatagagacagcggggagggtggctgaccctggcggccctggactgagcgtctggaggagtcgtggaggctctttcccttctttctcctctgagagctcgttcttcaggctcttccagcttgtcatgtcgagtgcctggccactgctcagggttggaggctcagtccctttgccctgtctgttccagctctggagctaactcagggatccctgatcagggttacataggtttggtaaaatgagtgctggaaattaactttctcccagtagtcttaggtcatgctcagtgaacttaaactttatccagatatggttttccttcagcctttctattccctttctagccagtgaaagacccgctgccctttgacctcagcccctccaagcccccaagtttaaaacgccaccccctgccaccagaaaaaacagaaaaaaaaaaaaaaaaaaaaaactaaaacacccatctggtctgggcatcttcctttcctttttcactatgtatcctgttactgggcttaaacagctttcagagaagagatgtcatttctattaaatgctctttcagtagcgaactgagttcacacttgactaaggatattttccggactgtctgtcatcagcatccttagtgggtttccccatatttaaattggtagaggccagggatggtggctcacacctgtaatctcagtactttgggaggccaaggtaggtggattgcttgagctcagaagaccagcctgggcaacctggtgaaaccctgtctctactaaaaattcaagttagctagctgggcatggtgatgcacttctgtagtcccagctacttggagagggggtgatgctggggcagcaggatcgcttgaacccaggaggttgaggttgcagtgagccaagatggtaccagcctaggtgacaaagtgacaccctgtctcaaaaaagaaaccaaacaaacataaaaaaaaaaacaaaaaaatcggtagagagtgatttctctcccaggcccacttaatgtagactgggcctggctgacacctcaccattcgtgtgatgtgattgctgttctgatgcttagatactcttggcgcagtctcacaattgccaccatggtaggaaggtgtcccaggagacggtgcaccttgaaccagtcaccactaaagtggctgcctttctgggtctctccacacatcccctctctctaatttccctacttaatcgtgtgacttcatggtctcaaaggaggaacagaggctgatcttgacttagatatactgaaccatgaaatcactgcatagaatgtggggacttgaatgtgtctttgggcaagtcatttaacctcttaagacctcatctgtaaaatggattagatatgtttaattatagccttagcattaaatattcattgctgttattattaagtgtctgataagtctctgtgtacatggatgtaatcttcctaactcccattacctccatttatagatgagggttatatggccaataaagcctgggtttgaatctaggtctactgcctccaaagccagtcttctctcctgcaacatcatgctctgtctagcaggagatgagaacaggtctccatttggagcctgtcagtggggtcagagactaagattcaggctcagggtctaaattccatatcctttcttccataccctggtgtttcctatgaacagatagatactttagggctgcaaggtttggattgcatggcactgctcagaagataagttacaggtctgggctaggctgtagctgcccctccaggtggctagacctttcctttctgtgtcaccagttaacactggccaacagttccttccattaactgttcactgctttctcctgtgtctaactgatgcagtttatgacccataactaagagcagtaccaggtatggctctgtttcctgttcatgtcccctgtcctctgggctgcatgcattccgttcttacagaaagaatacctttaacctagtacatcctgccacacatctgcttctactgtgaaattgatgagggggtattaccgattcttccctcacccatcatttactgagatgctggtgattgcattataatcctctaaagcttacattgtctttctgattcttggtcttatctgagcaagtgatctataaataactcagtggctttctcatgactgttttaattattagattttaatcaagtgtcttattaaatatatctgcatgcttccacaggcatctgtctcttcacatggctgttcagtgtgcctctcacaagttagcccacgttttctgttctcctgcttcaaactcagttgagctgccttgctttggctttgatcccagctttccagcgctgctcaatctgttgccatggcaggccattggaaaggctcagtgcatccccgtgcctgaagccaagtgagcgctcactccatgcatgcatggaggctgggcaggagcctgcctaatcaaccagccatgtgaggagggagggcctgttccttcctgtaagctatgtcatgaggcagcgtggtcaagtcctctgccagggagtggcctgggcccagcctgggcatgttttcatgccagggtgctagagcctactgccagattgtctccctccacccccaatgaaaaaatccttccagaagggaagagccaatttcccctgtattggaggggaagtggcagcacctcctgaagcagttggactttcatcaccctacctctgcatctgcctgaaggacagatttagccaattaacctaaggttaccttcctctctgataaattccccattctgtcttcccatgtgttgtgtctcgtttttttcctcctccttccctcttccttgccccctcttcccctaaaccttacagatagctcgtgaggctgaggcagccatgttccaccgcaagctgtttgaagaacttgtgcgagcctcaagtcactccacagacctcatggaagccatggccatgggcagcgtggaggcttcttataagtgtttagcagcagctttgatagttctgacggagtctggcaggtagggccctaagggcaggtaacactgttaggataaccagcctcttgctccacctgctctaggagaagacagccaggcccaacctggcatctgggcacagagcctcttctcgtctgtaggaacaccgccagggaggtcatggcagggcaggaccaaagggtcctgtggctcagtaggcacagtagatgtcacaggcacttggtgaaggactggtttctgtggagtcttgatcttggctcagctcagaatctccagtgattgggctcctcttggcctttgttcccaggaacatgttcctcaccagctgtccggtgactcttcccctccctctccttttgtgacaaagctctgacaaagctctgtccccctctcgtccctctggacggatgttgctcccctagattgcccgtgaggcagaggctgccatctaccacttgcaattatttgaggaactccgccgcctggcgcccattaccagcgaccccacagaagccaccgccgtgggtgccgtggaggcctccttcaagtgctgcagtggggccataatcgtcctcaccaagtctggcaggtaggaggcggcagcggctccctggaatgccctgctcagtggtacctcaccttgggggtcctgggagcagtccattgaacaatgctcaggtggcactgagccaaggtaagacccctctgcctgccaccttgggcctgcagggaaggattgagcagagccccttccctgggcccaaaggactctaggtagcactcataaggaatgtcagaacatttggatcaaaagcaaatttatgctggagatttattacataacagtgcacaggctgactacaaatggttatttgatattgaaaatttagtcctctaaaattgtaaaagataaccacttttgcttattccagttactatgtgctctttaaaaatttcagttgggaaatgaatttatttaaatgctgtttactgtgcctccatttggcacactagtccctgctgtttttgagccctaaagacaaattgggttccagctcaggagaggttgctgtgctatcttggctgacattctgtggggcctggcagccaggctgaggactgtgtggcctatgctgggcctccaacttgggatcccttccttggcccaggacattgagttaatgtccttcactctcctagttagggagtatgctccttgtccctgtccacagggcagcaagggtttcctggaagaggggagcaaacaggcagtgcccatgcactgaggagcagcagatgggcgtgggcagcccagagaaccaggacacaagctctgtgcagatgccctcagcagagggctccagcctcccactcttggctgaacagctccaacccgtagggttgacctttcttaaaaggtccagttcttgctgtttggctattttaagctctagtcttctggggtttcactcagctggtcctggcttcagcaattgcttccctctgaaggccttgcatagaggccaagcgtgaagtgcagggacttctctgctgtgatgtggcttaagtttccctgacacctgttgagtgtcctcataacttcccttctggtgcccctccccagctcctgagacacagctgcagctacaagtgtgcagtgtcagtgttcaagaaagtgcctggcagaggggctttagaagggtcccctgccttccaaaggagctttggcaggcagagctgctcctgcagcaacactcccatttcctgttcttgcctgctgagtagcacctagatttctaagcctcatctagatactcagatttgattctgggcctttatagcccagttgctgggactgtttcaggagctaggggccatgtggggcagggagagggcacaaaagtagagaagcctgatgttgattcccagggggctggtcagctctgctactgctccttgcagatgtcaagagtcaggtgctagtcacgtgctgcttggcttgtcactgtcattggcagcgagaggaatgggtgctggtgacattgggccagggctgcctctctgtgtcagagttcagggtgtaggaggggttctgccaaccatgggctgtgtggggtaagtgggtgaggctgatcttgctgggtcaaggtgatcctgagcccttggcctgtggaatgggggtagagggcaaatggtaacctagcatgctgtgggggatataggatgaggggctgcccgagcctcgggaggggtcctagggagcagatgttgaagaggccagagccctcagtgagctggatgagagggtgagctgtttgaacgccctgagggtacttcctggggcctcgtgtaatggtctcttctgtatgtcccccatcccatctcaggtctgctcaccaggtggccagataccgcccacgtgcccccatcattgctgtgacccggaatccccagacagctcgtcaggcccacctgtaccgtggcatcttccctgtgctgtgcaaggacccagtccaggaggcctgggctgaggacgtggacctccgggtgaactttgccatgaatgttggtacgtggctggagcaggggctagagcctagaggagcttggggatgcttgagcattggcttctgtgggaccccgaaagtttggggaatagaaaggggaacacacagaccttagtggggcaaaaggcccagcgactgttcctctcccttattgggaatgttcattctgaatctctcattctccgaagtcctaagctgagccaggagggaaaagggtcctttgagttgtagggctgagcaattcagttcctcttctcttctagtctggggctcaaagcaaaattgtccattttttggcatctgctcattactgagagttttttttgttttttgttttttttttaaataaaattggccacagctcctgtgctgtggggtggcatacacagattacgtactgatgtggccattgtccctgtataaggtagggtatcatcagatgacaggaagcagctagctctgaccctgggcaaggctttgcaccctctccaggatagtgaatgatgtccaaaggtccctgccaaccctgccatctgagtgataaggacatttcagggccttcctcctgtttgcctgggctgtgagtttggtgccaccttgtggtgtgaggaagtagtggtcagccagcctagttcagtactcaggctatggggcagctgcccaggtgcaaacctgcctggcttggcttttactcaccaacctcccttctcttcctccaggcaaggcccgaggcttcttcaagaagggagatgtggtcattgtgctgaccggatggcgccctggctccggcttcaccaacaccatgcgtgttgttcctgtgccgtgatggaccccagagcccctcctccagcccctgtcccacccccttcccccagcccatccattaggccagcaacgcttgtagaactcactctgggctgtaacgtggcactggtaggttgggacaccagggaagaagatcaacgcctcactgaaacatggctgtgtttgcagcctgctctagtgggacagcccagagcctggctgcccatcatgtggccccacccaatcaagggaagaaggaggaatgctggactggaggcccctggagccagatggcaagagggtgacagcttcctttcctgtgtgtactctgtccagttcctttagaaaaaatggatgcccagaggactcccaaccctggcttggggtcaagaaacagccagcaagagttaggggccttagggcactgggctgttgttccattgaagccgactctggccctggcccttacttgcttctctagctctctaggcctctccagtttgcacctgtccccaccctccactcagctgtcctgcagcaaacactccaccctccaccttccattttcccccactactgcagcacctccaggcctgttgctatagagcctacctgtatgtcaataaacaacagctgaagcacctgtttcctctcttttctgctggggagggggaggtggttgaaccctgccctctgagcaggctgggaatggctgcagcctcgtgccccgcagtgggagctatggtggtgtcacctgccatcctgcccacctcctggtgcagaggcgctgggaaagcagtagcttactatcttagggttacaggttgcccccttcagtgctgcggggagactttaatggcttacgtgaaccgaagatgggaaagagcagggacaaggcctccctcccactctggtagataaacccaaattgcaaagtggccttggccatggttcttccactttggtcttcctgcattagcgtatcccttatgggggctgtaggaggagtcagctctgggcgcctgagactgggtttggctccc

SEQ ID NO: 82 - DNA, 2516 bp, Homo sapiens
agtcccaccgaaagggcaacctgcccgcgcgttccgccaccgccgccgcgcttcctcctgaaggtgactgcgcccgcggggacgcagggggcggggcccgggtcgcccggagccgggattgggcagagggcggggcggcggagggattgcggcggcccgcagcgggataaccttgaggctgaggcagtggctccttgcacagcagctgcacgcgccgtggctccggatctcttcgtctttgcagcgtagcccgagtcggtcagcgccggaggacctcagcagccatgtcgaagccccatagtgaagccgggactgccttcattcagacccagcagctgcacgcagccatggctgacacattcctggagcacatgtgccgcctggacattgattcaccacccatcacagcccggaacactggcatcatctgtaccattggcccagcttcccgatcagtggagacgttgaaggagatgattaagtctggaatgaatgtggctcgtctgaacttctctcatggaactcatgagtaccatgcggagaccatcaagaatgtgcgcacagccacggaaagctttgcttctgaccccatcctctaccggcccgttgctgtggctctagacactaaaggacctgagatccgaactgggctcatcaagggcagcggcactgcagaggtggagctgaagaagggagccactctcaaaatcacgctggataacgcctacatggaaaagtgtgacgagaacatcctgtggctggactacaagaacatctgcaaggtggtggaagtgggcagcaagatctacgtggatgatgggcttatttctctccaggtgaagcagaaaggtgccgacttcctggtgacggaggtggaaaatggtggctccttgggcagcaagaagggtgtgaaccttcctggggctgctgtggacttgcctgctgtgtcggagaaggacatccaggatctgaagtttggggtcgagcaggatgttgatatggtgtttgcgtcattcatccgcaaggcatctgatgtccatgaagttaggaaggtcctgggagagaagggaaagaacatcaagattatcagcaaaatcgagaatcatgagggggttcggaggtttgatgaaatcctggaggccagtgatgggatcatggtggctcgtggtgatctaggcattgagattcctgcagagaaggtcttccttgctcagaagatgatgattggacggtgcaaccgagctgggaagcctgtcatctgtgctactcagatgctggagagcatgatcaagaagccccgccccactcgggctgaaggcagtgatgtggccaatgcagtcctggatggagccgactgcatcatgctgtctggagaaacagccaaaggggactatcctctggaggctgtgcgcatgcagcacctgattgcccgtgaggcagaggctgccatctaccacttgcaattatttgaggaactccgccgcctggcgcccattaccagcgaccccacagaagccaccgccgtgggtgccgtggaggcctccttcaagtgctgcagtggggccataatcgtcctcaccaagtctggcaggtctgctcaccaggtggccagataccgcccacgtgcccccatcattgctgtgacccggaatccccagacagctcgtcaggcccacctgtaccgtggcatcttccctgtgctgtgcaaggacccagtccaggaggcctgggctgaggacgtggacctccgggtgaactttgccatgaatgttggcaaggcccgaggcttcttcaagaagggagatgtggtcattgtgctgaccggatggcgccctggctccggcttcaccaacaccatgcgtgttgttcctgtgccgtgatggaccccagagcccctcctccagcccctgtcccacccccttcccccagcccatccattaggccagcaacgcttgtagaactcactctgggctgtaacgtggcactggtaggttgggacaccagggaagaagatcaacgcctcactgaaacatggctgtgtttgcagcctgctctagtgggacagcccagagcctggctgcccatcatgtggccccacccaatcaagggaagaaggaggaatgctggactggaggcccctggagccagatggcaagagggtgacagcttcctttcctgtgtgtactctgtccagttcctttagaaaaaatggatgcccagaggactcccaaccctggcttggggtcaagaaacagccagcaagagttaggggccttagggcactgggctgttgttccattgaagccgactctggccctggcccttacttgcttctctagctctctaggcctctccagtttgcacctgtccccaccctccactcagctgtcctgcagcaaacactccaccctccaccttccattttcccccactactgcagcacctccaggcctgttgctatagagcctacctgtatgtcaataaacaacagctgaagcaccaaaaaaaaaaaaaaa

SEQ ID NO: 83 - DNA, 141001 bp, Homo sapiens
aatttataaaggaaaaaggtttaattgactcacagttcagcatgtctggggaagtgttaggaaacttacaatcatggcagaagagaaagcaaaccatcctttctcacatggtgacaggaagagcaaagcggggtaagccccttacaaaaccaccagatctcatgagaactcactatcacgagaacaccatggaggtaactgcccccatgattcaattacctcccaccaggtccctcccacgacatgtggggattatgcgaactccaactcaagatgagatttgggtggggacacagccaaaccatatcagaagcttaaccttctttggagcatgattattcagttgaacctaagttcagtagtcacccagttatgctgtcttcagctactattttccatatgtttctcaaacatctgatatatcacactggctagtgcactttcttccaccagcataccatctcaatttaccactttaacaattggactgccactttgtgtcagggactatctgtgctccaactactacaagtgataaggtcctcactgacagccagggagcaagtgatccagctctaaaactcaccttatcatctgctttcctagaccactcctaacaaccaactattctgggttgagttctccaagaggcagagagttcaggatacagaatgttgttttgtttttgttgttgttgctgttgttgtttgtgtgtgtgtttgggcttttttgagacggagtctcactctgttgcccaggtagaagtgcagtggcatgatctcagctccctgcaacctccacctcctgggtttaagtgattcccctgcctccacctcctgagtagctgggactacaagtgtgcgccaccacacccagctaatttttgtgtttttagtagaaatggggttttaccatgttggctaggctgctcccaaactcctgacctccagtgatccacctacctctgcctcccaaagtgctgggattacaggcgtgagccaccacacccagcccagaatgtttattagaatgcacaattaataccagaggcagtggggaaggaaggactgagcagaggaggaagttgagttgtgattcaacccaacaactgcctggctggcatggggagctctggagttaaatagggccatcagactttcccagtgtggggccaacatgactgggtctttatacccccacctctgtcagtcactcaacgtggtctccctgcaacaaggtgactcttgcagccgagacaatccctgaagggacagagggctgaagcctgtctgccaacagcactcccagtggctggaacaagtccttccctataggggaatctgggcggcacacctccatctccatgtccatcacatacgatatcacagacatttaaatattttgataactgtacataagagtttcctttataatcttatagatcttattttatgcatttgaaaatattcttctgagacagggcttttatcatattgccatagggtgccacgatataaaaaaggttaaatactctctgattcagaagtatccaatgatgacttctctctcatgcatttaattgaaaatctggtttttctccttctctgctagttctctacctctctccccacctcccacatcatagcctattcacatatgtctgaatctcatgatagacaagttcaggttcttttcccaggttctttttaccacatccccccacccccacataaaaagtatatatggcacagcctaggttccacccaaatcctttctcctcttcttcctgggcccacaactctcctacatacattggtataccttgcgcttagggatggccatgtgactaagttctaacagtggaacatgatcagatgccacttccagcctctaagacagccagtgtgtttcctccataagctccttctcttcctcccaactggagactctaaatgatgaccctgcctcaagcaagcaaacaacaagtccctcaggggtggtgtaggctgcaaatggaaggagcttgagtcccaaaccttccacggagaaggctggctaccaacctggatcactcacccaagactgctcgaagagttggtttgaaccattgtgttttggggtctatttattacaacagtttagcttgctttgtgaatagatttagtggcagagcctccaaattctatagatacattgatctcagtcctaaccgcatctggaacaccattaaataaaggaattgcaaacccagagaaggtaatgaatttgtctaaggtcatacaagatggctaggatcaggacccaactctccagttttctttcttctctgctattctgccttctgtgatcctacataagtgggcatgattgtataacatatgcggccatgagatttctctttcagcaagagaaagggacaggaagaaagagagggaatgcattttcttggcctgaattagtgtgagccattagttacctacattgactaaattatctggaatgaacattcaactctacatcacatatagttaaaatgacagatctgcttaagattgtttctagcatacgttatttcaatttaggcaaatgtgaccattcagtgtgaggggaccatactgtcattaggtccctgtcagttctcaattatactgttatcttagagggggaaaaatgtgaaatttgaatgtagacgagtgttgatttgactgctacagtttattttacgtatagaaataaaataatgtgtagcaaaagcattattacaaagatgataatgaaataactagtatttataatagtataatagtatagtatttataatagtatgatagtttaatgactatttgtcagatgttgtgtaagaaactttatacacacacacacacacacctcatttaattcctgtatcaatcaggatacaggacgctgtggtaacaactcctcaaatctcggtggcttgcacaacaaatgcttatttcttttttttttttgacaccaagtcttgctctgtaacaggctggagtgcaatggtgcaatctcggctcactgcagcctctgcctcctgggttcaagcgattctcctgcctcagtctctcgagtagctgggaacacaggcacgcgccaccacatctggctaatttttgtgattttagtagagatgggatttcaccatgttgctcaggctggccttgaactcctgacctcaagcgatccacccacctcagcctcccaaagtgctgggattacaggcatgagccactgcgcccagccccaaatgtttatttcttgctcatgtgacatgtacttcctcgagtttttccttcctgagatctaagctgaaggaacagctctctggagccacgccattctggtggcggaaaggaagagtaaaagtggtagaaccttgcaatgctcttgaagcgcctatttggaatgtctacatcatgtaaatggtaatggacaagtatgtataatccccacaccaaaaaaaggggacactattggggacaataaccacatttcaatgctgcaagacggatattgactgcacccccttcccactttcagaaagaagaagagtaattttgctgaactccttctagagactggaaatgtcccttccagttggggtgattagggaaggctttggtaaaatttgagctagagtttgaaggttaggtagactactggtgggtgaagaaagaacaaggacctttgtaggcaaaggaaaacctcagaattacagaggtggaaaaagagttctagtcaagccacttcagctggctacagagtaggtgggaaagaaaatgggaggacaagggctcagatgatggggggttggggcattggggggacacttgaaagctaaactaaggggttgaacttaatttaggaggcagttagaagcttttacatatttttgagcaagagagtgacataattaaaatgatctgggccaggtgtggtggctcacacctgtaatcccagcactttgggaggctgaggagcttgggtcacctgaggtcaggagatcgagaccagcctggccaacatggtgaaatcccgtcctactaaaaatacaaaaattagccgggagtggtggcatatgcctgtaatcccagtagctgggaggctgagacaggaaaatcgcttgaacccgggaaacaggttgcagtgagccgagatcgtgccactgcactccagcctgggcaacagagcgagactccatctcaaaaaaacaaaacaaacacacacaaaaaaccaaaaataaataaataaaatgatcacttctgaatactgatctaactaggggttgcagggtgggctgatatagggagaaactggagagcaaggagatcactaaggtccctacatgtccagaaccaagatagaggtcttgaactaggatggtggcagttagaacaacaacaacaaaaagtcaattccaggctgagtgcagtggctcatgcctgtaatcccaacgctttgggaggctgaggtgggagttagaaagcagcctgggcaacactgcaagacctcctctctaaaaaaaaaaaaaaaaaaaagttagccaggtgtggtggtgcccacctgtagtcccagcaactcagaaggctgaggtgggaagattgcttgagccccaggagttcaagcttgccgtgagctacgattgtgccactgcactccagcctgagcaagaccttgtctccaaaaaaaggtcaattccactgacttttctaaggtgtacaccatcaaggggcagctccatctccaggccattggctcatgagacattctgtagtcagaaggctagggcagattgctttgagcaagcccccatggtggttctcactcctacttctttgggtatatgcccctctgtttaaaaataaagttaatatgcatttaaaaaaaaaaaggagaaaaaggtcagttccagaaactgtgtgaataaagcattttacttgctttttctattaatctataacatatgttgattttttaaaaagaatataagagctatgcaaattggagcttcaagacaacttcccatctccctaggaggagatggctgccctaaacccccctacatagaaatcatcccactgcttgggcttaaacttgatgttggggaaatgaaaaatccaagctaaggccgaagcctggggcctgggcgaccagcagaatgaggaccactggtcagtttcaggctgaggtgcgtcttccaggggacaatctctagctggcccttaaacattcagacttcaagctctatttacagcataaaggtgtttcaaaagacgtgatacaaataactgcaaatgctctgcgatgtgttaagcactgtttgaaattcgtctaatttaagatttttttttctgacgtaacggttagattcacgtttctttttttttaagtacagttctactgtattgtaactgagttagcttgctttaagccgatttgttaaggaaaggattcaccttggtcagtaacaaaaaaggtgggaaaaaagcaaggagaaaggaagcagcctgggggaaagagaccttagccaggggggcggtttcgggactacgaagggtcggggcggacggactcgagggccggccacgtggaaggccgctcaggacttctgtaggagaggacaccgccccaggctgactgaaagtaaagggcagcggacccagcggcggagccactggccttgccccgaccccgcatggcccgaaggaggacacccacccccgcaacgacacaaagactccaactacaggaggtggagaaagcgcgtgcgccacggaacgcgcgtgcgcgctgcggtcagcgccgcggcctgaggcgtagcgggagggggaccgcgaaagggcagcgccgagaggaacgagccgggagacgccggacggccgagcggcagggcgctcgcgcgcgcccactagtggccggaggagaaggctcccgcggaggccgcgctgcccgccccctcccctggggaggctcgcgttcccgctgctcgcgcctgcgccgcccgccggcctcaggaacgcgccctcttcgccggcgcgcgccctcgcagtcaccgccacccaccagctccggcaccaacagcagcgccgctgccaccgcccaccttctgccgccgccaccacagccaccttctcctcctccgctgtcctctcccgtcctcgcctctgtcgactatcaggtaagcgccgcggctccgaaatctgcctcgccgtccgcctctgtgcacccctgcgccgccgcccctcgccctccctctccgcagactggggcttcgtgcgccgggcatcggtcggggccaccgcagggcccctccctgcctcccctgctcgggggctggggccagggcggcctggaaagggacctgagcaagggatgcacgcacgcgtgagtgcgcgcgtgtgtgtgtgctggagggtcttcaccaccagattcgcgcagaccccaggtggaggctgtgccggcagggtggggcgcggcggcggtgacttgggggagggggctgcccttcactctcgactgcagccttttgccgcaatgggcgtgtgtgtgtgtgtgtgtgtgtgtgtgtgtgtgtgtgtgtgtggaggggtccgataacgacccccgaaaccgaatctgaaatccgctgtccctgccgctgttcgccatcagctctaagaaagacgtggatcgggttctagaaaagatgactccctgcacgcccctccctgcacctcccgagcagtgattccgacagggccttcactgcccctgattttaggcgggggccggccccctccccttttcctccttcagaaacccgtaggggacatttgggggctgggagaaatcgaggagatggggaggggtccacgcgctgtcactttagttgcccttccccctgcgcacgcctggcacagagacgcgagcagcgccgtgcctgagaacagtgcgcggatcccactgtgcacgctcgcaaaggcagggttcacctggcctggcgatgtggacggactcggcggccgctggtccccgttcgcgggcacgcacagccgcagccacgcacggatgggcgcggggctgcaggtgcatctcggggcggatttctttctcagcgctcggagcgcagggcgcccggcgtgtgcgctccctgccggaggcgcggggctggcgcgcagggctcgcccctcactgcggcagtgggtgtggaccctggtgggcgaggaagggggaggataggctgtgcctcctcccactcccgcccccagcccccctttttttccccctcggaacgcgaggtgccatcttttttcggcgtgtcacgtctttacggtgccatgccaaaccgggtggccgggcttcataggacagggcggggcctggcattaaagggagggggacaatcagcgctgaaatcttggcgttttgctgctgcgggcgtgagcactgggggcgttcgcccagcaccttcttcgggggctctttgctttgtctgtagaggttacgtgatctgcgctcccagccctggtttctggcttttattctgagggtgttcagtcaacctcccccctacgcccatgcgcctctctttcctttttcgctcctcatttccgagcccattgttggatctcgaggcttgctgggttcgatgaactcgagtcaaccccccgacccccggcacgcatggaacgggcgtgaccgcgcgcagcctcgtctcggagtctgccggcgccgggaagcttctgaagggatgggattcgagtctccgtgcgcgctgcgggcggcggcagagggatctcgcccctccctacaccccaagtgtcctgagggccacgccacaccaggttgcccagcgagggacgctggctacccatccggggatgggtggggagccctggcggggcctctccggctttacgccctgttgcttcgcctggccggagaatgtgaggaaggggcataaggttactggtgcttcggccacacccatctttctgagcccactggactgggcgcagaggggggattgccatggaaaccacaggtgtccggagaggggatcttggggctggcctcaccccttccctgcggagattggggaccctggggtagggggagccgcgcccagtcggcctcctggaggacacgggaggaagccccgaacccccgcgcctgaggctgtttctgattggcccctggaggccgcagacacgcagataggcggccctgggtgtatttttattaatattatgtccgtactgattaatattatttatcttaaataaatttcacccgtgtccaagttcaccgcgcccccaaaaccgagtctggggcggcagggggaactcctggccaacgaatccatgcctcgccctcctgtgatgaacctggtacgcacggttttctggttaattctatcgctgaaaactggtgcggggggcgcacttctgagacggaagagcatctaggagctgaatcctccacgcgggtcgcccaggttgatctgaatttctggggaatggcttggctgcccgcccgggaccaggccgaccctccttgacggtggcgtagagggctggagcctgggtactgcgaggctcctcgcatggctgggcccgccgcgaggggttgcagagcggctcagggatcgattcaagcatcgtctctcctccctcgcccccagacagagctgggcgcggggttccccttccagatggagcgagggtctcggggtggccccggaaaaggggagcccgcggccacggctacgtattgccatctcgcgagcagagatgtcacctcctgcctttggaggaaagggagcccggtggggatgagcgcatttagcccaatgctgggaacaaagcgcactccgcgcttctgcgatttcgctccattttgaaatgtgttggcgctttggtggggccgctgcggtgggcaaggccgggggcgctgttaatggaggaacctcagggggacggtccttcgtaggaaactctatcctggctctgcgcgcgctttaaggaaatggcttccctccaggacctcgagggatgcagcttttgcgcggatgacggtggggtgctgaaccagccggtgcgcctctggaaatgtctgggcacggatcctggggccatcgacgactcctccccattcccagcaggcgggagctcttacattccgagcgagtgacccctctcaccctctggcgctcacacacctgtaactccaaacctccgtctcagaatggtccaggctggaagggatgatgggggctccgacagcgactgcctagctcacccctctgcgtgctcaggctccaggctcagcaggaccaatttgagttctatctgatccccctcggccccttaactgacccatcctacaggagacagggaaatgtctttcctaccgcggttgattctggggtgtcattttgtgttttgtgatggctgcttatatttactgtataagcattgtatttactgtataagcattgtattataattactgtataagctgcttatatttactgtataagcatctccaaatcctccctctacgtaaacaaattaatggataaacagataagtgtatcccctgcccccacccctgctacgcaggtccggagtgactcttgaagctcatacattccttggccaagtttgcttctctaacagatgtttatatagcaataacctggcttggctcttgggttcacctttggacgatttggggaaggggcttgttggctttgctgggttttggatgagtgacagtccatgactgttcctgctggaagggcgtgacttttaagtggtttctaatatcaggcattgctcctccgacaggaacaaaagaaatggatactgcccataaattgttagaaaacttagaatcgctttgattgaggaaaggttagatttattccggttggaaaaagtggcctttctattaaacgtgccctttgaccctcatgcccttggaggtcggtgccagcctggagatgggataagattgtggttttccttctgcctttttaacatctgttgttacagtccatttgttgaaaatttaaagaaactgttttattccactttccctcagcatttatgtgtgtggtttcagtagctctgtggctatatgtacgaacacgtgttatttttccaattggacatgtgataattttccaactggaccttgccttctattgatgtatttatttagcatcttccttactccctccttgaaaaagaatcactcaaaaacaaataaaaacagccgtaggggcctaatacagtgctagacatacaagaggtattcggtccataccaaatggattttatccatgaaggataaatggggaaatacagtgggaagcaggtgggaaactgcgtttgactctgctctttcctccaccaccactttcctcatcaccgtgttcagagacccccaaagccccctcacactcccagaaacacccccctggccactcctaacttgccatgcccaggagttaggtgcttccactagtgacatggagctggcgtttggggggcacctcagcaggtgacgggaagagaagaccccagcctcaccagctgggctgcagcagggagaggagtcctcatgttccagcagggactctcagctgttttcctgtaaaaccatggttctcaactgggggccactgagatgtctagagagatgtttttgttttcacaactcggggagggtgctactgacatcttgtgggtagaggccaggaatgctgttaaacatcctacaaggaaggcacaggacagtctcctacatcaaaatatgacccagtcccaatgtcaccactgctggggttgacactggcactgctatcttaattacattcattgagtgtcttttaggaggccctattctaagtgcttgctaagattatctcatttaatcctcacaacacttccgctatgtagcaggtgctgttattatctccgtgatggggaaactgaagcacagagagggttagtaacttgctaaaggtcacagagccagtgggtggtggagctggttgcctgacactagttccctcccctctcagccacatgtgggtttacttggccattgtggactagtctgggaacccagatatgatctataacattgacccagtagaatattgattccaaaaccactgtctcacaaatgaatttttacaagagtctgtaatcggagcatgacccagaataaggttagggagatgtggagttaaagctctcaatttcttatctggccccgacacagagagcaaggcatttcactctacattggtgctctgtttataaaacaaagagcaaatatctcttcctaaggtccttaaacctcttcccccaatccagggtttctggactgctctgccatatgacggggcagctggtttgattgacccagggaaggctggaaatcaagactgggggatcaagacgtagattcagtgtggccaaggtcaagtctctgaggtttagggacatcagatccccagcttaggttctgtacctcggcaaggtgaaagcgttggcgcccactgatgaggcctgctctgagattgtgggtgtgggttgagttgggtgggcataggcaagtcctcttgtaagaatcttttggcaaagatgggcctgggaggcttttctcacttcctggggcccaggctttgcaataagtattccattatactgtggtaccttggggctacctgagaatcctctgtctcgcccctgttgccttgccaaagagtttgctgtccaagaattcctttcctgtctccaggtgccatgctcctgccacctctgccaggttccctgcctgcccagatggctcccaactgagtgtgaggaggaatttgagacaggttttgagctttctgggttctccagttaggaaactttctgtaagcatgcagatagaatgggcttcagcaaaatacaaactcgaacaacttccatgtatagtcccttaattttctttgcttttttcatatttcatcaggctccatgctgagcccaatcagggacccgatagaaatccaaacaccatgtcagcgagtccccaagaaatgcattttgtgccaaggctattcaaggaaggtttgggagcagctcaagggcagacactgttaccctcccccaggtccccagtgcagggcagtgttctgcatgtggaggcagtttggcctaatggttaaggaggtaggctctgatcgggcctcctgggcacaaatcccagctccctgctcactgtgagacctaagccatattgtttagctgcttggagagttttttgtcatccacaacttggagtatgatggtacctgtctcacgggttgccatggggttcacacaagctaacccggtactcactagggccaagcacatagtaactgctcagtaaatggcatcatcggcggtgtcctgtggatgagtgcttgtgattggctgaatgaccagaggggtctaaagatcctggtgatggaatcagttgtacagataaattgttacactgagtagggatcaagataggaaaagtcggcaactacccagctcccctgcaccaaactgggcagaagtggatcctctgaaaattgcacacacccatgtttaaatgtacacacagaactcttgccacaggcaagcggagatttgtcatctgctgtccctgcctcatcttcttcctgaaatccactccatgccaggaataaactgcatgctctccaccagcccaaactgacctgccttcccgccagccatcccgggcagggtgacctggcttagtacatcgggttcagagatctttccagtttactcgttgaataaaaagtgagggctgatcgagaaagtaatggcagtcagggaaggcgaaggaggtaaagaagagattttacaaatgaagtaattcaacagagtgctgacattggtaaactggcaaacagatttcagggtggttggttgagagtagagtagaaaaggattaaataaagcaaacttgtggtgtactgaatcttaggaattccatgtatccaataagtatagtcatttatgaattaataaattcggcctaagaagccttcttatcgcttaaatcaagactaagtaacaatatatcagttttaaaaagtcattatatcagaaaatcatttaaatgatacacatagatttccaagattttactttaaccgaaactatataaatgtgaatttgttcacccatcttttgacacagggctcaggtcttctcttggtgtctggatcagccagttgaaatttcttgtctgttttgcctatgccacattaataatgcactgtctgggtcctccgatttcagtttggattttgggtttacattgtggagtcatctgaatgcagaatccttcagggattttacttttttttttttttttcatggtctttaccatcccatttgatagtaaatattactcacctttatgaagtctttccaaaacattcaactaaattttcttaaaatcattgaatgatttgaagagcttattcctcagcacttttactccatcagcttgcaccttattttttaatctttttttgagacggagtctcgctctatcgcccaggcttaagtgcaatggcgcgatcttggctcactgcgacctccacctcctgggttcaagcaattccgcctcagcctccgccgtagccgggactacaggtacacaccataatgctcggctgatttttgtatttttgtagggatggggtatcgccatgttggccaggctggtcccgaacttctgacccaagtgatccacccacctcggcctcccaaagtgctgggattacaggtgtgagccaccgcgcccggccagcttgcaccttatttaggatatgtgattattatagcaagtctggtgtacatacaagattttgaatgggcacagatgacctttagtaagtgcttggctgtgataagaggcagtcctgactgcagatcaggctgtgtggaccccagccttgcatgtttacagaccttcatgtcttattcttacagggtatcagaagaacacctactggggaaacttataaattagtaaaaggtgggcattctccccgcccatcttctgtctgtctgccaggactagcacagcactttgaagtcattcacatagaatcccaacttaagagggtaaaatcctcctcaacagactgaaaataagtttaaattccctttgctatattaactcccctgaggaaagagtcttagatcaatgtccaacactaaaaacagttttaaatcagcaagtgagaattaaatctgaagcaattgataataatgtttcattcattcctctcctttggccccgtccaccctactgctaaatccaggcatcaaagagaagagggacataattatctctagtcccagctgctggttttccttccagcctatggcccagttttctgttttactgagaaggctggtgatgttatcttgggatctaagtctgcagtttcaccacaaaaagtccagggatgcactttcatgcttgtgtcctcctccctgggatagcaaggatattagaagacccctggctctgtaattgcttgtcatgtgctctacagacgccacagaatgccaagaacgaagtgctgggaaggacaaattcatggaaccgtgggacggtgctcctcccccagcgtaaaggacagctcctcctcctgaattggagccagcgttctaaatcatgtgtcaacagagttgtcctggatcggatccagttctgccattgatttgcaggtcatttcagtggtacctgtttccagttgttcttaattgaacagtggcaccaaactattgtcttgcctcatccccctcccatggcctgtcccccaaaaagagacttcttgggtaattaatcagggcaacatcaggcagtctgggcgcggtggctcacgcctgtaatcccagcactttgggaggccgaggcgggcagatcatgaggttaggagattgagaccatcctggctttgtgaaaccccgtctctactaaaaatacaaaaaattagccgggcgtggtggcgggcgcctgtagtcccagctactcgagaggctgaggcaggggaatggcgtgaacccgggaggtggaggttgcagtgagccgagatcgcaccactgcactctagcctgggcgacagagctagacttcttctcaaaaaaaaaaaaaaaaaggaatctctttggttttatatatattttttttatatatataatatatattaaaatataatatatatatttatataatataatatataaatatattatatattatatattttatatattatatattatatatattatatattatatatttatatatttatatattatatatatttatatattatatatttatatatattatatatttatatataatatatattatatattatatattatatattatatattatatatttatatatattatatattatatatattatatattatatatttatatattatatatttatatatattatatattatatattatatatttatatattatatatttatatattatatatatttatatatattatatattatatattatatatgtatatattatatatgttatatattatatatatttatatatataatatattgtatatattatatatctaatatattatatatattatatatattatatattataatatatattatatattatatattatatatatttttatatatataatatgtataatatataatatatataaaaacatatataatatatattatatattatatatatattatatatattatatatattaaatatattttatatatattatatatatatacacatatatatatataaatgaggccaggctcggtggctcacacttgtaatcccagcactgtgggaggatcacttgaagccaggagtctgagactagcctgggcaacaaaacaagatcctgtctctacaaaaggaaactgtaaaaattagctgggcatgatggcatgtgtctgtagccctagctacttgggaggccgaagcaggaggatcgcttgagcccaggagttcaaggctacagtgagctatgattgtcccatagcactccagcctgggtaacacagcaaggccctgtctctaaactttttttttttaattctatttatatttacatgtatttaaatgtgaatattcactacctatttgttgcatgcctgcattttttatactgggcttgccaaaaacccgaacagctttctactttgacaatgtatcagaatttaaatcagcaatatgttaataagccaagcaaaggttatatatgcaaataaaactgttgtctataacctcctgttacactggggcacagcaaaagtcatggtgtagtcgcatgtgaacctgtccctttcatagctgctcattgccaggaaacatcaggaatagccatttggaagagtcatcagccctcccaccatccgttttctgtcttgtcttttccctatgagcaggggaaattccacgctggccccaatccccagtgcagcggctcagcctctgcctctgctgctggtccccatgaggccagcttagaaacggaggattttgcagaacatccctaaatccgcttgaataatgaagtgatcattcataaactcacctgaaccttattaaaacctatttaatatttttcctggataatcctatagggataacttgcctcctgggcttctctccaccgggttcagttcttcctttagtggtgaagttcctcccttcttagcatctcaactgtgcctgagaaaaggccagtggcggctgcactctgttccctgtggagtgttaataaagactgaataaattgaaataaatccctttcaatgtcattaagtgctataaataatcatgaaccaatgttcgatggctgatgagaaatgcaagaaaaaatttttaatcagtaggattcataagttgacaatctgggccaagttaaaaaaaataaaaataaaaagacttttaaaaagatcttatcgtttgttaccagtaagactgaattccagaagcaagctactccctcatttgtgggcccctgttatcactggctgcttagggttgccaagccctgaattcatttgtcaactaagagatttttggccaagattaagatttcccatgcctccatatttccatctgagaaatggagattatactgtcttccccctcagaatggatgataatgtggtctctcttctgttcgcatagtcatagaactgaaataaaacaacttaagagaattcctttgagcttctcagaagtgctgcagggctgggggatgcctcccaggagccgcagtcaggtgctgatctgaagtctttggtgggctgactttagcctgacctgaaatagtatagctgctgccacctggctcccttagcgtcagtcagacggtgcagctggttcctaggggtgagggctgagccagcagggtccgtgcccaggagggatgcatgggtggccacagcccagcctgcactgatcttgtctgtccccttctttggaaggaaggagccccaaaccagggtgcaagacagtgggtgggggtgccttgagcatgacctcaagtgatttccagcccctgccagtgctgacttctctggggaagggctgggacttccttctgggctcaagtcacgacccttggatggaatttcctgggagcttttctgttttttctggagttttcagttttttcctaaccagacagggacttggtacagaatctcatattctaattatgcctaggagcagcctctccccaccactcacagtgtttagcatgtgacaggaatcgattaaggcatgagtgattaaattaaagccaggcattgacttggatggtgtaatattctgacatctgtttggtgtcaaaggcacggggcaggcgcgttaattgaactgcttgcacctggcatttgaattgagccagagcggggctaaagtcagtttgccttcaccctgtaaatggagggtttctccggagcgtggatggtgggaggtatttcagggtgtatgcataacccccaccctgacaatggcccatctcttctccagcgtggccaggtttgagtgccagtcctgggtgtccagtggccccatagccttgcgttttagtaaaatgctgcccccattaccacctggtctgtgcacttcggtcactggaatttgccatcttccagtcccgaatgtggcaagccatggagccttaagctcttctccctccacatcctggaacagacccgccagtttcttccaggcattgcctcagtttgcccctctgtttccagtcacactctcaccagcgataaaatgattttagaccttatcatctcaccctcggatccttatggaaacaataatgagttgttccctgtttcaattccaaaattcatatccaatccgttttgcatgccattgccaaattcctcccagagcaaccccgtcacctgccctggccctctccaagtgtggtcctgccatgggcatcgcctgctaagccaagctggcctcgagctgcctgcccgggtccccacaccttggctcacctccctgcccagtcccgcctcctgccagcctgccctgtggctccttcatagatgccgtgctctttctgccccttgctcacccatggcagccttgcccctctctccctgccccaccccctatttaaattgacctgaccttcctcagtgtccatcttccccgaagctttccccagccttggcactcaaggtccagaggctacgcgtttcctctcacctgtggcagcgccgtgctccccagtgcctcacagtttccttcttgcccccgcttcctgtgtaggactcatctgcccacaggttgcacgtcctgtgagggcaaggactgtgtcttatgtgactttccttctccagtcacagagctgggcacatagatagctcaaaaccctctttattaacacagttggatgttgagaaatcaaacaggccaatgtcaaatgagctctccttatttaaatcaagtcagttctccacctcctagcactcagttccagtactctatatacatggaaataataaaaaacacatttcctttgaaacattctataatcgttcctttgccctacttcagaccaacttaacgcactccccattggtccaaatgagttttgctatacgaagatgctgataataatagcagcagtggattattctgctaaaaccattgcctcgttaatcctcagtcccgaggtggggattattatcctcattttgcagagaagcaaactgagactcagagatttcacagctggggagggagccagctcatccctctgtccaggcccaagctctctcccgcttgccttcctgcctctgcaacctcagagcatcccccatctggttctactgcctgtgctagtcgtgcaggagccaaaagacacgtctttagtgctaaggactggagaagccatgccctccagcctctgtgaatgggtcatatgtaacatgagcctggagaaattatttgaaaccaaaggcaagcctctaaaccaggctgctgcttcatggcgccggtgacggcagaaccaaatttagtgctgtgggcaggtccacacttatcaaatagagaagctcatttttcttccggctcacatcaagcatgaaaaatgttcacacataccccccacacacacatgctttccggaggggtccatgtggctagaggctggaagatgtggatgagaggagcctggcaggtaagcccagggaagatgacattcagcttcccagacagcatctacagggagaaatttaattaaaagtggggcggtttccctgagcaaggcagacaaagtcagccctctactgttaagaaaaagggtcacagtgagaggggaggtgaggagactgagtctgtattttctagtctgttgggctacactacctgatcccccttcctcaaaaatccactttactttccccatgtctacaccaatgtggttcacactctgggaccaggaaaagggggagtgatggggaacagagaagggaggagctcacacagctgaggctggggttatgcatatcgaattacttagaatttgcaacctcacagggtactttcatggcgttgaaatacacttcccacagccaccctccctctaactaaaagcaagagtcatttctcagttctggtcttgcctcccacgttctcctccacatttaagaaaatccaccagctacaaagtgaagataccatatgtgatatcccaccctagtttctgttttatcagggtttggagcaggtggagcaggcagagggatcatttcagcctataaattgtattaagggtgagtactgagtcattcttcaagaaaagttttagaagcatccaaaactgaagggtggagccacctggagacagtatcatcagtcctggccccgagcatggcctgcataggcccccatggatcccagcgggagctgcagagtgcgggcaccttggcacacagccctgagtgcaaaattaggagctgggcagagggcatctctctgtcgccattgggcagcccagggcacactggtcatagccttagaccacgaacaccctgtgcccgggggacagatgcaaccagtgtgccctgggctgcccaatggcaacagagagatcgacacctggaccccatgtcacggggactccactactaaggctcctaagactgccaccttccagtgggataagccctgcctcctactgggcccacaatgtgcagagaacacttgggactacctggctttctggatacacaaatattgatccaatctggactaattagaaggtcagtcccaataacaaatcgaagtcagctgggcgtgatggctcactcctataatcccagcactttgggaggctgaggtgggcagatcatttgaagccagaagttcaagaccagcctgggcaacatagcaaaaccctgtctctactaaaaatacaaataattaggctgggtgtggtggctcatgcctgtaatcccaacagtttgggaggctgaggcaggtggtcacctgaggtcaggagtttgagaccagcctggccaacagggtgaaaccccgtgtctactaaaaacataaaaattagccaagcatgatggcatgtgcctataatcctggctactagggaggctgagacaggagagaatcgcttgaatccaggaggtggttgcagtgagctgagatggtgccactgcactccagcctggttgacagagcaagactctgtctcaaaaaaaaaaaaaaaaaaaaaaaagccatgcctggtggagcactacgtgtaatctcagctatttgggaggctgaggcacgagaatcacttgaacctgggaggcagtggttgcagtgagctgagatcgcgccactgcactccagcctgggcgacagagtgagtgagactccatttcaaaaaaataataaatctgagtcactttaatattgttatttggatgtcaacctctaggtgtttgagacaggagagtgatatgggggcactggaaacacacaggcacggggtgtcctcacacttgggtagcccacacgatgtgatttcagggtgctgggaggtccccccactccccaaattactaacaagtggatagtactttacagtttatatgatctcatttgattcttaacatgagcctgtgagtgaaaaattccttcccctcttctacagattaggacgttgagattcagggaggttcagagggattcagggaagtcaagtggcacctggagtcccgtggctaatttgaggccggtaggggattcgaacccaggatttgtgcttcttatgcctgggcttctgctccctggggcatggtcttccccctagctttcccattcactgctttagcctaggggtcctaccctttattaaactgccagtgcctcactgcttttctcccccaaagacaaaaaaaaagtgtttttgcttttgttttgtttttcatgggcagagacctggaatttcagcttgagaatttgtgccatatgataaataaatcaacagatggctttttccttaaaaaaaaaaaaaaaaaaaactaagatgtatttgcagtgaggcataatttgtaccaaaaagtgctcaccacactgtagtcatgggggcaggaggcagccgcgggtgaagggagaaatcttggagtccaggcagcccccttctgggctgaactggggagctgggggtgctgccagccctgccaggttctcctaggaggcggcagctcatatggctgtgggaggaggcagagggagcctcatatgcacccacatttccagggatctagaagacagaaggaggaaaaccaccatcatgttaaagcagacagttaggtaacacatcctgtaatacaagttattttttccacatctaaaggctaaaaatagttgttagaatttaaagataattggtaaatgagtttctatccttctagtttcacatcaaatggaatcatgctgccttcacatcactagtgcccgttatttgtgtttaatttccacaatgttgtctaattccactctttgggcttccccagggatccagcctccctcactcgcccatcgcagggagatgctttattcatctttgtgtcttctgtgccgggcatagcgcatggcacagaataagcactcagtaattgattcacgagtgaataaatggatgagtgggtgagttcaatattgactacaaaaaccctaaggccacactggtgagtggctgcgcctgtagtcccagctgctggggaatctgaggcaggaggatctcttgagcccaggagtttgaaactagcctgggcgatatagcgagaacctgtctcaaatgacaaaaacagggccaggtgcagtggctcacgcctggaatcccagcactttaggaggccaagatgggaggatcacttgaggccaggagtccgagaccagcctgggcaacatagggagaccctgtctctacaaaaaattttttaaaaattagctgggcatggcggtgtgcgcttgtagtcccagctactcaggaggctgaggcaggaggatcacttgagcccaggaaattgaggctgcagcgagccatgatggcaccactgcactgcagcctgggcgtcagaacgagacctgctctcaaaaaaacaaacaaacaacaaaaaaaaaggctttcttaaagagacttgagaacagaaaggggaacagatacataacttatatatttatttgttcatctttccaccttcctggagggtggaggggaacaggtctgtatttggagttttgaatgctaaaagtgggaatacatgtactgtttgccatgatctgttcaaaagttaagccaaatgccttagattctcctgaaaactggaatgccactgtaaactataagccccacttcaaagataaaagatcttgatgaacagggctgggtctgtggactgggcctctccccaccacacaaggaagggtggtgccagttgaaggaaaatcacttaaatccttgctgtctcctaataaggtgtggtcccaggtagggctgtcagaattagcaaattaaaacacagggcatctgtgaaaattagaatttcagataacaacaaataattggcataggctgcataatgtccctcaaagatatcaggtcctaatctccagaacctgtaaatgtgatcttatttggaaaaggggtctttgtagatgtggttaaattaaggattttgagatggggggattatcctgtattatctaggtaggtcctaaatgcagtcacactcatccttgtaagaggaaggaagagagagatggaaaacacagaagagaagacaatgtggtgatggaggcagagattggagtgaggtggccacaagccaaggactgctggcagctaccagcagccagaaaagtccaggaaccaattctctcttggagctccagagggagtgtggccctgctgacaccttagcttcaacctagtgatcctgattttggactttggccttcagaagtgtgagggaatgaatatctgttgttttaagccaccaagtttatggtcatttcctacagcagccacaggaatcaaaaacagtaagtatgtcccatgcaatgtttgtgacacacaccaaaaatattacttgttgttcacctgaaattcaaatttaactgggtctcctgtattttatttggccaacctagttcccaggcccaaagaaagaggcttttgaaatttgcaagaaagctggttggagctgtcagaaagtggactttgtaaacacagtaccaccgaaccaatttgaactgtactacctctagacaaaagagagggcagtcagacagttgttcgtgatttcttctttcaacagtcatttgagcacttactacaaaacagaagctatgtgtaagggtggaggcgttagctgttaatcaggacctccaggctaagtttctgtattagtccgttttcacgctgctgataaagacatacccgagactggggaatttacaaaagaaagaggtttaattggacttacagttccaagtggctggggaagcctcacaatcatggcagaaggcaaggaggagcaagccacatcttacatggatggcagcagacagacagggagagagagcttgtgcaggggaactcctctttttaaaaccatcagatctcgttagacttattcactatcaagagaacagcacagaaaagacctgcccccatgattcagttacttcccaccagatccctcccacaacatgtgggaattcaagatgagatttgttaccatatcagttaccaacccttccagataaatcacgtgaaatatcgccattaacagagtgagctcaggtggttcttcagtgcatttctgatacctgaaccttccctgggaatttcacagaccatcaggctctccaccctttgatagcaggatagcagggcccaggttctgcaggaggagatgttaccacaggcctgaaagggagggaggggcagatgctacaggaagatgctggctctggattcgctggaggagctttcaagggaagtagatacacactgtctccatcatttcatgtccatcacactctaaaatgctttggacaagaagcaaatgttaaagacaaatgtggcccattttcctgtacaaagagggctgctcccatgccaggctattggcactggtgggcatgaggcttctctgctgccctggccggggggttctctcactcaccattggctctctgacacctggagagaccaccacccttgggctttcatgatgctcacagaatccacactgttggagctttaaggagcctggatcaactggaacaggcagggagtactaggacagcccagcattgccccaaaatatccaggcctgataaaagagaaaaacaggtagctcacaggaaaaggataaaaaaaggaggagggatttaacatgaaaaggtgcttgatctccctcataataaaaagactgctgattccatccaggcaagtgacagaaaaaaaaaaattaatttaaaaagactgctgataaaaccacagcgagacactgctgctcagggatctgagggtgtgggcagccaggctgccacgcatcatgggtcggagaggaagaccacacccctggagcagagggcggctgatctgtcagatgccctttgacagcacctcagcttccaagaattaaccctttctatgtgagcagaggcatccatggggggacacactggtgaatcatctgttatgtagaagtctggaaaacatcaggatggaactggtgaaataagtgtggcctctgacggaatggagcggtccgtctgcactgctgcgggtgcccctcagatcctgtgggtcagtgagaaaagcagtgaggaacaaggcaggtactgtgtactgtcctctgcgtgcaaggaaggccagcgcatgcaacagagtccacacagacatagcctaactctggaaggaagaatgagaatgcagtttcagtggtggcctctggtggggagaaactgggtgaagggagatgtcatttccatttctctactattaattttgtattaccatgcttaaatgttactttttacctttttttttttttttgagacagggtctctctctgttgcccaggcaggagtgcagtggtacaatcatggttcactgcagcctgaacctcccaggctcaagcaatcctcccacctcagcctcctgagtagctgggactataggcacgcataccaccgtgcccagctattttttttaatcaagatggagtttttctatgttgcccaggctggtctcaagctcctggactcaagcaatcctcctgcctcagcctcccaaagggctgagattaaaacgtgagtcaccctgcccagccaattgctttttaaaaaagattaaatgcatgtatacgctcaggcatcagcacacttggaaaggatgaaaatatccggaagaagggttcttttaaaaggctcctcaagtgatgctggcaggcatgacgaatgtccctggtcacaaaagctctgatctggcctaaccctgtcatgttagagactggagtgcgtgtgtgtgcgcgcaaagtgtggggggatgggggtgagtgtgtgtggtgtgtaagcatgagtgtgtatgtgtgtggtgtgggggtgtgtgctgtgtgagcgtgtgtgagtctgtgtgtgtagtgtgtgtgtgaagtatgtggtgtgtatgtgtgacgtgaggtgtgtgtggtgtgtgagttgtgtatggtgtgtgcatgagcatgtgtgtgggcatgtgatgtgtgtgtggtgtgtaagcatgtgtgagtgtgtatgtttgagcatgtgtggtgtgttgtgatatgtgtgtggtgtgtgagcatgtgtgtgtgatgtgtctgtgtgtggtgtgtgtgagcatgtgtgttgtgtgtgtggtgcatgtgtgtggcgtgtgagcgtgtgtgtgcattgtgtctgtgagcatgtgtgagtgtgtgtgtgttcagcatatataaggcatgtaactgaacacagcactttagagggctctcctggagtcagagggggtgggtaggaggagaagggaggtgggctagtgtgctgaagtatctactccttgtcatagtctgtgacaacccagactagcccatgagccaccctgttccctgcatttccaatgagacctcggtggacatgttccctgaggtgaggctgactgatgtcatttgacgatcttgatgccaaatccttttatatcaaaaacaaccagaacactctcttttctcttagtgctttcacccagatgaccacatttcatcctcccagccactctgggccaggtggcactgctggtttgaaagggaggtctcccctggagtaacttccgtgggcggattcacaccctgcccacagtcctgtcccagtcagcccaccatggtggtctccggttcctccagaattcccgcttttcagctcatccccacattcccggagggactgagagcgcagccccagggccctgctctttgggggccgtctctacacccagagaagcagcaaggcattcctaggtttctctttcagatgcagaacttcagtgttcagagatgttcccactggtcctgagagggctcagttcagctttaatgactgcgctgttgcgtgtgctctgcagagggcgggtggcccagcgtggctgactgcagttttcctgacgtggagcccgagcctgccccgctgtttattaattaaggatcactctgcttgcagaaccctgaactccccagaactgtgaggtgggagaaccccgagaggccacctggccccacttcccacctgctgcccaaaccccctctctgccttcctgacagtcaccccaactcccagtgatccccatcaaccatctgacaaggggactgagagggaagagaaaggaggggcccaaagaggaaggtaaaactgtcgggaacagcccccaaatgtgtgacagccttcagtggagttgcccactttcccttttctcctccctgcaggacctcccttctccccagtcctccccaacttctgaggttacattgagaaaagtctgcagagaggtgccagcatcacaaggtgttaaggaccacgagtttggcattttaacagatgccagagccacttgagaaatgtggtaactaagcccagagaggtacagttaacctccccagagtcacacagcaggttcatggcaaagctggactagcacaggtgtccttcccctgcagatccccttctgtgccccacatcacctccctccagtgtctgggccacctggagatgggccctcagactcacccggccagaggtgccatctcatgggagaggtctggccaggaagcatcgatatttgagatcccaagaaatgaagacttggcctgtcagatgacagacttcggtcatgggaacacgtgatctgttttacacatgcgtcccctcagcagcagctttccagaacattcccactttcttctgtagtgagaagaactctttccctgcagcctcctgcccaactcctccttcagtgtctttgcttcagtgtctttgataaaccattctgctttgcagagtgcgagctctgccttgcagggttcgcatctgcctgtgctgagtaaccaacgctaaggtcgagtggtcggtcacctctcataagagctagggttgtctcatgctgatgactaggacttgccctcaaggagaaaaataaatcaaaacaaaagcaaaaacagcaaacatgcatctcttaaagaaggctctgagtccaggtaaatttccttccactgaagcagccaggctgaattcgaattatctttgcccctgcttaaaaactaatgcaaattttcctagagaatatccactaattcctggagggggcatgggcattcctgatgcccatgagaggaccatttgctcttccctcagtatgctaaataacagaagcgacatttgttgctggaaagtatcagtgaagttaataaggtttttcttgcccagggtgagggaacagttcccaatgacaaatgctgtatgggaaggggctgtagaactgccagcccctttggtccatccgtaaagtgaactctgtggatcctggaggattccagcgtctttttttttttttctttttttttaagacagagccttgctgtcacccaggctggagtgcagtggcacgatctcagttcactgcaacctccgcctcccgggttcaagcgattctcatgtctcggcctcccgagcagcaagactacaggtgcgcaccaccatgcccgactaatttttgtattattagtagagacgggggtttcactctgttggccaggctggtctcaaactcctgacctcaggtgatccacccgcctcagcctcccaaagtgctgggattacaggcatgagccaccatgcccagccagcatctttcatttttctgtctgctttggccctttcctctctcactgtcttccttttccatttccaaagtcagtccatctcactattagcacaaaaactgctagagcgcttgtcattggtcatctctccctgcacctggctggtctgttcttggccactgaagcgtttcccccagctgttgctttaatcattttattgttattatgccttacttaagaaatggatatgagatgcatttacctgtctcttcctgccactctgcagagccagtaagatgtggtggaaagggcccaggctttggaggagggctggctggggttggatcttggctgccccctactagctgtgtgaccttgggtaagtagctggacctctctgagcctggttcggaatcatagcacctctctttcagggctgctgtaaggaatagcagtggtgtgtataaagcagagcgcacagccagcaactggcccctagccacactgctgagcacctactgtgataagctgccattgtggtgtgtgaagcaaaggggaaacatgcctgctgtagtgagcttcctgtagggcaggttgtagaaccagaggtgggttccaaggttacaaagggactcttagtgtattagtctgttctcacattactataaagacctacctgagactggatcatttataaagaaaagaggtttaattggctcacattggctgggtgcggtggctcacgcctgtaatcccagcattttgggaggccaaggccggcggatcacttgaggtcaggaatttgagaccagcctggccaacatggtgaaaccctgtctcttctaaaataaaatacaaaaattagctggccatggtggtgtgcgcctggaatcccagctactcaggaggctgaggtggaagaattgcttgagcccgggaggtggaggttgcagtgagccaagatcgccccactgcactctagcctgggcagcagactgagactctgtctcaataaaaaaaaaaaaaaagaaaagaaaaagaattgcaagaaataaattattgtttatgagctatatggtctgtggtaccttgttgtgggactgggagtcttggcgtctccctgaccctgcctgttgctgcagcaccgctcagccctgcctgctccctacctgcctcccctcggcctctcctgcctccaccgggcccctggtgcctcctctagagacagtcctcctgggaccgattgtgttctcacttacacgaggcatccaggactacagataaccagaggaaggggcgccccccccgcctgccctcctccctggcatcctcacgctgcagaggtcagagcctcatcccagccccttacctgcccctactctgtggagaaccgtggtcagttcgccaggccggatccacgaacggccttgtggaagatggtgagctcacacccagagctggctccgatgaccctgtctcctttacatgtttctaccttcccctccctaccttcccccactgctgggcgcagagtggaggcagatgaggtttaaagctcagaagggcttaaacgggttggggcgcagtggctcatgcctgtaatcccggcactttgggaggccaaggcagaggatcacttgagcccaggagttcgagaccaacctgagcaacatagtgagaccgcgtctctacaaaaaataaaataaataaaattagctttgcagggtggcatgcacctgcagtccctgctactcagaaggctgaggtgggaggatcgcttgtgcccaggagtttgaggctgcagtgagctatgctggcaccacagcactccagcctgagtaacagaatgagatcctgtctcaaaacaaacaaacaaacaaacaaaagaaggcttaaagggggctccaggtgggcttggcagcacaaagctatgaagttctatcttagacacaagttctgttactgggcctttgcaggctggcctgggtacctggctgccatagacagggaaccttccagatgagctgcaggcgtggagcacaggagccagggtgctcttcctgggctctgtccacaggcagaacgtacacagtctttgtacacgtccggcggctctggtgcctatttttgtttgtgtttttcttttgtttggggggatggatttggtttcccccgagccctctgtcctcctgtcacctggctggtgctcggcaatgttgaccagctgcctggctggagttggcagtggctaaggctgtgacagctaacatgttcctgagtcctctcatttcttcaccataatgccctgttgagtttgcagatactgtctctgtttttatctcccggggaaactgaggctcagagtggctaggccaccttcccatggtccctcagctcatgagggccacacagggcattgcggtggccttctcctcagccttgaccctccggccccagcattgctgcctcaaggggtctcctctgctgagccgtgcaccttctgcctggcagctccaactctgtggctgtgttcagtggctcagcactgccccttgaccctccctggccttctgcggatgccagactggagcactctgacaaggtctggggtggttgtatgggtcctgtgacctctatacacctcccagtgcctgggaatcctgcagatacaccctccttagccgtccctaaccatagaggacatttctgaggtccccgagagagtggggcacccctgcaggatccaactgctgggcccaggaaggatagcagcagcatgaggggttccattagccacaaactcacggcatggaaccttcacccacctcgcccctcatctgctgtttagcacctggcacgccgtgtatacttactgattattacattttaatggcaaattatagtggcaaacgtatgcatctttgcacaattgttgtacagcatgatgaacaagtcattaatagtaaagaataaatgtgaaagtgagaaaaatctgactgccaaagtttttactccttccttccctccccagacttttaaatgaaagtttagggataatcccttagttgtcctgctagtaggacttgcaattaaaagaattgggccaagaacacttctacgcttctccttttaggtttgggtgtaaattcggggtatttctcactgatgaaagcctggtgcagggcagaccgtgggaagctttcatttccggaatggaccatcaacatcccttggagaagaattctcttctccagacccagacctggtgtcctggcacccattgggcaagtgggtcctagaagacaaacctggtcagagcctggaggctgcttagcattccccacgcacattagcagctcggagagctcaggaagccgcagcccctccttgcctcaccagcctggatcaggacagcatcccctggaagacacacagggcctggcctctgattacccagcctggagggaaagctcaatcgagcatcatgtcacccggtgcccccatgcagggtggcactggtgagacccccaagccaatgataccacctcacaggagtgcaggcccattgtggccagatcatcttgacttttcaagataaatcagaaatcgtatttccatgagatatccctatttgcaagtgatggtgactaaattagaagtttttgaatattgtaacatgttcgtaggctgtttgtctggtttaaactctatctggaggaattcaagctagacttcaggaataacttcttgaggcaaggattttgagaccttagggaaagaaggacgtcttgggggtattctgactgttgtcctcctggaagggaagaacagagaactagaagactgcccttagcgaagttcaaagcacctaagcccgggaccctcagcaagtgttcttgagtcacagattctccctgaggcgcctctttctggctccatagaatggctgattctgtaactcggtgagtttgctttttttttttcctccatcacccaggctggagtgcagtgaagctggagtgccgtggagcgatcactgcaacctctgtctcccaggttcaagcaattctccttcctcagcctcccaagtagctgggattacaagcatgcagcaccacacctggctaatttttgtgtttttaatagagacggcccgaagtgctaggattacaggcatgagccaccgcggccagccataactctgtgactcttgttacaaaggccttatattttgctctttgagggtggttttggtttgatgcctgttggttgccatcttttaactagggatgttttatcaaaatgcccagccaaagtgtccaaacaaattataccttaaagtttgaaaatgtctggcacttctaattcaatgcctgttgtgccaggcactgggctgctgaggaactgagtcccgtccctgcaggctagctagagaacacacacacacacacacacacacacacacacagagtggtcttacaagtcagttttatattctacctatatgcaataaaggtattattatgttgaggtgccttgatataaaaatttttcttaaaggagaggatgcctaaaacaggcattacctgaaacctcctctctccagcattggttgtcttctgtcatgactcagggttttcactgagaatgggatggaaatgtggtctaaagatagggccaatgttgggactggatcccctctgggaagtcagaccaggctagggcaggtccttgaagccatcaggaaaagcctctggagccagaaacaaaacaaaaaaaaaatggtgttaactaaactcagtctcaaatcctgaataggactcaagtcaagcaaaataattaaaggagttagcaaagggcaagtcagagagaccgagcaacaccaatgtcttccgggagccctgtggcgagtgacagagcctggactctggagtagaactcatcttgtgtcttcttctgccactcgttagctgggtgaccttgagccaagccccttaacctcttggaccctatgttcttatctctaagtaggggctggtaatatcttcccctttgaggaatgccctctaaggggtgttgtgaagattcggtaaggtggcaggggtaggactcctggccagaaacaggcacataataaatgctaagtctctccttctctccacctgctggatgctgtagatactaaggatttcgatgtgaatgagacaaaacccctgccttccaggagcctttgagaatcagagaactagacccatttccagaacaaggggatgcagggtctggataaagttttggggatcaatagagcagagggctcccagaggatcccatagggttgactcctaactcaagggcatgagacaacccccaggaagggcaccctggaaggggtccggctgtccctgatttacttgtgggcactgggggaatgcccggagccatccagccctcagggctctgtgtgattctgggttcctcccataaaagataatcagattctttcacgttaatgtctttctccacctcattgcacatcatgcagctattcattgactcagcaagtatcagctttgcatgcgaccttggcctacccactttagcttttagtaatagctcccttcttgaataatacaaccagtggggaaacagaacctaactcttacctctgggaggcttatttgctttgagaacatatgtcctgcagttttgttcatatggcagtgaagtttcgtgcacacactctagagccaggcagcctgggttcaaagcgcagctctgccaggtcctaactgcatgaatttgggcaagtcgctcaacctctccatgcctgagtttcctcatctgtaagattggagcaatggtaatacctgctttttagggttgagaagagaattaaatgaattaagatgggtaaagtgcttagagtggagctttgcaagtagtaagtgctatgtaagtgttcgatttaaaatgaaagacccttaaatacattctttgttcatttcacaagcccttcatttcacaaccttacatttcacaaccaagctctgtctcccctggaatccagccataactctgctcacaagtgtgagacaggccccagcagagctgcacgaagaggagagaaggcagccccccagactcccaaccccctgtccaagatggcaaaaccagaacacagcctctgtaccaccccagcaggtattcagaatctgcaatctccaaagcccacttcaattgtaaatgtagagccacgtgcgctttaagtcacctgtcactctggaggctcttttgctcagttcctcaccattagcagggatgacagggagtgcaggagtgcggtcgactcccagatattggagagcgctgggctagctgcccattctcccggcctccactcctctttgctgtccagccatcacttgctctttgaaggcaaacaaaacagaaaacagtgccaaaagtatgggaagaaagccagcttctcccctggggtgcctgtgatgccatgcccaccctccctgaccacgcagcccctgtggaccctcagggccccaagcccccatttccatcacatgcgtacacccatgtgtgtccatagccgcccatctcagtcaataaggctgctcctgcccacttggaatagtggtgacaaccaggagtggcttatgggaactatcccaatggcctgacagcatgtccgctgcaaaccgctgaggtaggacactgccctcatgtctagctgatcagcaagaggcgcagttgctttcttaggtaacattgctgctgtgtcctggccattgctggggggtggcacttaatctacaccagaattttccctcctgtatcttccaagctgcttggatcttggtgctgaattaggttggactttgtcttgtggggaagggaggactatagaccctcaacgtaagcaatggtcagactattctaagaaaactcgccgaattaaagcatgaggtaaatttagttctgacttctgtccaccccactgccactgtccccttttatcccatgatcccttgcttttcttttcctcctctctccctatctcttgtgtttgacgcatgataggaattcagaaatatatgtttgtggatttgtttattcacgtagcaaaccatttcttgagtgcctaccatgggccaggtagaatgggcggccccgggctgcagtggtttcttcagcccctctccagggtttacactgtgcaagacggtttgtgatgggtcctcccatcgaggaccacactcttctttctctgtgccccttggtcctcagtctctgaccccacttcaaaggcagcattcactcagggaagctcccatacaatgctagtcagagtaaaagtttggacaaattgccaggaagcagcttgtcagtatgcataaacagcctttaaaatattactactctttgacccagaatttcacttctaggaatctgtcctaaggaagtagtcacatgcaaaagatttatgtaccaagatgttcatcaaagtgttgttttataacaggaagtctcagaagctggataaatatccaacctctggaaatggttagatagaatagtatgtagccattagaaaattatgtctatggggtttaaaatgtcatgggaaaacacttctgacataaaagagcatgagaactgtatatttagcataatcttaactatgttttagaatgcacaggaaaaaaatgtacaaacatattcatagtgatgtctctggtggtaggattatgatcagtaagtacttctgtctcttcatattttcctgtatttgataatacatgcatatgttgtttttaaaataagaaaaattttaagtttaaaattggagctgaaaagtgtttttaggtcaggcgaggtggctcacacctgtaatagcaccactttgggaggctgaggcagtcagatcacttgagcccaggagttcgagaccagcctggccaacatggtgaaaccccatctctactaaaaataaaaaaattagccatgtgtggtggcacacatctgtaatcccagctacttgggaggctgaggcatgagaattgcttgaacccaggaggtggaggttgcagtgagccaagatcgtgccactgcactctagtctgggcaacagagtaagactctatgtcaaagaaaaaaaaaaaagaaaagcctttttaaacagtagcagacataactatataatccttactaagctgtcggtcaaatttttatttatatatttattttattcatttattatttttagacagggtctcactctgttgcccaggctggagtacagtggcgtgatcatggctctcttcaaacttgacctcccgggctcaagtgatcctcccatcttagcctcccaagtagatgggaccacaggtgcataccaccacacctggctaattttttttattttttatttttagagatggtgtttactatgttgcccaggctagtctcaaactcctgggctcaagctatcctcccacctcggcctcccgaagtgctggggttaccagcatgagccactgtacccagccctcaaatttttaaaaatctataagagacattattggacaattagagaaattcacatatggacttataatagtatcagagtgtgtggtgtgatggttctggagggaatggactttttctttggagacaggcttttctatgcccacccttttatcttgctaacttatcatcatccaggttccagcagaaacattacttcccccaggaaatttcttaagggtgcagtatcatgatgtctgcagcaaattctcaaatagctcaggaaaaaagtacgtgtgtggtatgagtgtgtgtatgtatgtgtgtatatatatacacatatatacacatatatatacatatatgtgtatatatatacatatatgtgtatatatatacacacacatacacatatatatacacacacacatacatacatgtatttttatataattatatatgcagagagtgcaaatgttgccaagttaaagattggtgagtctaggtgaagggaatatggtatttattgtattatttgtgcaacttttcttaagtttgaaaattttcaaaacaaaaaattggaggaagaaggcatgccagtctaccccaagccctccattggaatgctgaaaatctaaacaatgtgatttggcaatttcatttcttttctgttgtgggccagtagtccttagatgttggggaagggggtagtcgctgaggtgtggttgacttaggatggaagaagcagaagtcaagactcccagggtcaaagtggtttgctctgctgacccaagtgtgggaggcccagagtcagcgtttcaggtgtgctaattcagcatggttctattcacggccaaagtccaccctgggcacctctctggcagcaatcttgggtgactctactaaggccaggcctccatgaccctatgtctggatcccatatctccacctctcccactgtctcaggaacggtgcttagctttttcttttccctctcctgtcttctttgccagcatgtagaaagtttaaataattcccctctttacaacaaaacaaaacatacccccttcagtcaaccaccctagctctcttctccttttcccagccagatttttttaaaagcatcctaggccaggcgcggtgactcacgcctgtaattccagcactttgggaggccaaggtgggtggatcacaaggtcaggagatcgagaccatcctggctaacatggtgaaaccccatctctactaaaaatacaaaaaagtagccgggagtggtggcaggtgcctgtagtcccagctactcgggaggctgaggcaggagaatggcgtgaacctggtaggcggaggttgcagtgagccgagatggcgccactgcactccagcctgggtgacagagtgagactccgtctcaggaaaaaaaaaaaaaaaaaaaaaaaaagcatcctcagcactttggcaactccatctcctcccaacatgtccctgttactggaatccagccaggactcagccccgatctttctactctaaccagttgtctcagttaacaaggacaggtttatgctgcagtgacaaacaagatcccaaattcttgtggcttcacacatctggcaccacctcatcttccagccttaggagtcatcttttagttccttgaaaactctttacagttttctgttggggccttgtcatatactattcccctggaatgttctttcctatcccctccctttcaccttgctaacttgtgcccatccttcaggtctcagcagaaacatcacttccttggggaagttttctccaacacccacactacacaggtgtcccatctacactcctatgactttgtggtacttgtctcacttcattttccactgccttccccacaaggcacctgcacaagggcaaggaccgtaccactgtacctatgtcactcattgctgtggtcacctgcactctggctgcctaccttaactacacattagaatcacctgaggagcttttaaagccacaatgcaagactccaccctaggccaattggatccaaatccctggggtagggccagacatcagtggagttatatatacatatatatattttgtttgtttgtttgtttgttttttgagacagagttttgctctgtcacccaggctggagtgcagtggcgcgatcttggctcactgcaagctccgcctctcgggttcacaccattctcctgcctcagcctcctgagtggctggaactacaagtgctcgccaccacgcccagctaatttttttgtgtttttagtagagatggggtttcaccgtgttagccaggatggtctcgatctcctgacctcatgatctgcctgcctcatcagcctcccagagtgctgggattacaggcatgagccactgcacccggccatcagtggatatatttttaaagcactgcagagaattctgttgcatcagcttgagaaccactgatctgccttgtgcttcacatttaaaacttttttttaatgaataaataaaccccaaaaaattaatctccctaagcctccctagaagataggatggtaaggatattttcctaggtaaaaatatgttaatttcatatttcatgaaatttcatgtttcatttcaatcaagctctgtcatacaccttacatggggcaagcccagtgcctgggcagggtgtaattatactcattacacaggcaaggaaaagtcacattaggtgatggagcacaaataggcagttaatggtttcagggctagttaggatatgtttgtctttcaattgcaagtaatagaagcccaaagaaattggttatttatataatataattgattggttcccaaatttgaaaaattcaggaatagacccagcttaggtacagctggatccagtcactcaaacaatgtcacaaagaaccctttgacaggaatgtatcctgtgttgactctactttgctctgagtagtctttccccaggtgatgataaaaatggtcatcatcgccaggcttgtgtcctgtttagtaggaatatacaagaagagctcagtaaatgctggccccaccactaagcaaaaacaaaacttttgttgttgttattgttgttttaaataacagcttagacctttcttctttccttgttattctctttcatctgtaatccagttttctacttctgaagtatagaatgttctgatgatttattcttcattacccacaacttgcacatgtttatttaaaaatgccaggattgcctggccgttgtgtgctgttaacctttgtttgctgttagtggatccctgaagttcaggctcccaggggagcagataatgggtatccagttcctgcaatatccaccctctggcaagccaagttccttcctgggtaaggttttgcctacctgcattcctagggaagtttctgggcctgaccaccaagccagctctgagaaggggtgcataagccccaccatgctttggctctgtccctatagaatattttatgttgttactgaaaactaaaggaagatgggtgcggtggctcatgcctgtaatcccagcactttgggaggccaagacagattgatcactcgatgccaggagttcaagaccagcctggccaacatggtgaaaccttgtctctacaaaaacaaaacaaaacaaaaattagccgggtatggtggcatgcacctgtggtaccagctactcaagaggctgaggcacaagaatctcttgaacctgggaggtagaggttgcagtgagccgagatcgcactactgcattccagcctgggtgacagagcaagattctgtctccaaaaaaaaaaaaaaaaagaaaaggaaagctaaaggagagagactaaaatgatatcaggttcctggagaacaaacagacatgattttgcttcatggcaggacagccggaagaagtgggattatatcctcacattacaaataagaaaactgagactcagaatggttaagtcacttgtcccaggccacacagccagtaaattacagaaacagaatttgaacccaaatcttccagctccaaagcttgtgttcttttcactacctcctgcttaattttttaatttctaagattagacccttcatctatccatgacacctgcctgtcatcccctgaaaaaaggtgaacgccgttcagaaatttttctagcctgagctcactcccagttcacttatttttgctttgtcatggctgcccagtccccacttgtagaccaggaataggtcatggctgcggggactacacgctgtcgctgctgcaagggccggcctctgtttccggggctgagtgggggccagacctgccaggagcaccatcttctgtgggtcctgcctggatgtcacatcccggccccaagaagtcactgcaaaccttcgtattattgagcttcacatcctagaatttgctgtcactgtggctgctgcatgaagttgtcctgagagaaacgggcattgtcattaacagggaaattgatggtctgggggaaaagtcatcctcattctcttgcagatctatgggtgattgagactggctgatgttgaaggggtttctcagccatcgtgtgccatgttatggaacagtggtgtagccagccatttgacacccagcgctgacctttgtttaacaacctcacctatatatgacaaaatgattgtcagaaataatcgtgtaatgaaatgactgtaataatggccagaaaagaaacgcagatagtaaaatgtttctcttgttgaactctgtacatataattgcaccaggatttttttcaaataaaaagtaaatattatactacaaaaaagggaaaaagcacaagcatttattaaatagctttctatatctttctgagttttgatcctttgattgcagactgatgtaatattttatgtaaatcattgcttggttactaagtgaactttaagaaaagtgagacgtctgcagaagttgcccataatttagcagctactgtattgtaccattgatgtacggctttattttcttgattaattatttaaacaatataattcacaattttaaaataataaatttccacttaaaatggtatttaaactcagcaaaatatatcatctatgagtaaaatttgtatttaccaagcaaaaatattacagtttgtggttcacatgctgtctcactgttttaaattttaaatacaaaaactccaagtaggctgggtgtggtggctcacacctgtaatcccagtactttgggaggctgaggcaggcatatcgcttgagttcaggagttcaagatttgcctgggcaacatagtgagatcctgtctctactgaaaacaattagctgggtgtggtggcacatgcctgcggtcccagctactcaggaggctgagataggaggatcacttgaaccctgggggacagaggttgcagtgaggcaagattgcaccactgcactccagcctgggtgacagattgagaccctgtctcaaaaaaagaaaaaaaaaaaagaaacacaaaaactccaggtggtcgcacagaatgacaggactgaagtaacttagctccaatttctgtcttcataatcactgtcctaccattgtctgtgcttagaatctacttgcttaatgcaggaacatgtgttctcacagagatggaaaatgcaaatggcgccagaagcaagctggaaattctgaaccattaagaatttactctctgccaggcacggtggctcacgcctgtaatcccaggactttgggaggctgaggcaggcagatcatctgaggtcaggagttcaagaccagcctggccaacatggtgaaacttcatctctacaaaaatacaaaaattagccaggcatgatggtgggtgcctgtaatcccagctactcgggaggctgaggcaggagaatcgcttgcacctgagaggtggaggttgcagtgagccgagatctatctgcaccattgcacttcagcctgggagacagagtaagactccatctcaaaaaaaaaaaaaaaaaaaaagaacttactctcaaaataaatacgtgtggctgactccacatatggtagggccaactgtataactagaagttctccaaataacttctgtggagaaaaaaaagtttattaaaggttaacttttttaaagtgctaactagaaccttactaacactgagatcgcaccaattgtttataacttagacagggccgggtgcagtggctcatgcctataatcccaacactttgggaggccgaggcaggtggatcacttgatgtcaggagttcgagaccagcctaaccaacatgatgaaaccccatctctactaaaaatacaaaaattagccaggcacggtggtacacgcctgtaatcccagctactggggagggtgaggcaggagaatctcttgaacccaggaggcggagattgcagtgggccaagatcgcaccattgcactctagccccagcaacaagagtgaaactctgtttcaaacaaacaaacaaaaaaaaaaacctcttggaccaggaaaatattttttaagggaggagtattttatcactggcattgtttaggattgcaggcacatgatgctaatgaaaagcagactaactattagttggttttattactgtttttgaactctctctctcccttttttttttttttgagacagagtctctctctctgtcacccaggctggaatgcagtgactgcagtctcagctcactacatcctctgcctcctcagttcaagtgattctcgtgcctcagcctcccgagtagctgggattacagggcaccacaccaggctaagtttttgtatttttagtagaggcagggtttcaccatgttgcccaggctggtctcaaactcctggcctcaagcgatctgcccatcttgacctcccaaagtgttgggattacaggcgtgagccaccgtgcctagccctgtttttgaactctctagagacagtccagccccttattacttgtcctgaggcagctgctcccttcacctggccccccgcattgtgttccggacccttgtcctggtggtgctaaagaatatctctgtcgatcctttggggactggggaaactgaggcccagtgccacgcgatgccatttgttcagggaagattaggtcatctgctaggtccccagtcacttgaccttcttcccagacaggaagaagctgctctgggtctctcagtgctccacgtgtctttgcacattgaaatgttttctgattttttttttttttttttgctgttacatttacttttaaaaaataacaagcaataaaatgttacatttgagaaggttgaaatgagaattgatttgagttaaattctagcagatttttcttagaagaatgatatcatcatctccagctacctgcaattgatctactctgaattaagaaagagacttccatttgttgtttatattttgcactcttgatgtgtttctttaaattatggtcatgggccaggtgtaggagctcacacctgtaatcccagcaccttgggactctgaggagggaggatcactggaggccaggagttcaagacctcgtctgtacagtaaattttaaaaattagccaggcatggtagcattcacctgtagtcttagctacttgggaggctgagatgggaggattgcttgagccagaactttgaggctacagtgagttattttcacgccactgccctctagcctggctgacagagcaagacctgcctcaaaaaaataagtaaaaaataaattaaatttcaatcattagcagtcattaggatatttaaatacagtatgttgaatcaaagttacgcatgtgtgtatttttttttccagagagttgtttatcatgtgggttttaatttaactttaaaaaaatgttggctggacagttgcccaaatggtatcatcagccatttggttgagaacgtatgtcctgcgggctcctctgtcactggagttttgctagctgacagccactggctagttagagactgcagtcagcacagatgcaggcgtggacttgcgcacgtaaccatgtcaatgcaaagccatcacttcttaaaaattctgaaccctgctgtctgagatggtggtgcagcggatagaactctgctctaagaggcagtagctaattccatgtcttctttgcccttgactagctgagtgactttgcacatggggcttgcctctctgttgccttgtctgcaaagtggaatcatcttttccttgctagacagaaggtggaccctggacctatggcctttttgagtttcccccccgcttcttagaaggacctctgatcctactgagtttaatacccacgggttaataattgggaaaagcaaaggaagcgcttctgtttaggtaattatatgcatgtttttgtctttttctggctggaaagatatccaagccactgggaaggtccgtggctacccagggtagccctctctggggagggctgctatatccaagagcccctcatgagaatttgaaaatcgaccatggtagggcctgctgacttttgacagctaatggtgtgctgagaattgtccctccaaagatgcctttccattccctcgggagagtctgggcagcccctactgggggctgggatgctggctcttccctcagcctccaccccaactgctctcttccctcctcccctccccagccccctaatttctctcacaaggctttgttctgcagcaacctttcctaatgcagtcctggcctcttcgcagcttcattacataaccttccgtggactcctggtccaaggatcaccccagaaagccagtcagaggtaggcacgcagctggggtccatttacttaccttccccaccccctcggaactcagaggtggtgcaggaatttggactccaagaattaacagctccaccaccatcaccagagccaaaactcaggatgcatgtgcttcatctgctgcttatttccagctgagagccagtggtgccatggttccttagggagccggtcccctgatgccggctcctggccccaaatctctctgatccgggctcttccagaatgtcttgtctccaccatcgcctttgaccaatggtgtccctttgcctggtaatgtcccctttgcctgatgatggccctgtcactcctctctttagcacagaggaggctgtttcatcccttcaagcctgccctcccttcaagtcttagctcaagttcaccttctccgcagagccttctccaatcttcttgactacgtctcctctcagctccagcaacctctgtctctggcactgattccttacttagctaagagaatcacagacacttggggctcaggacaatctgctttctctcttcttacccatggccttggactgtgtgtacctctttgtctccactcccaaacccaacccccagagggcagagagcatgttgtctgtccctttgctcagcatgaagccatgcgtgtggtagatcggcagagttccataacttgtgttgaccgaggggtcactttgctctgaaattacccctgtgtccttcagtatttgcacagatagcttcctggccagaccgaatatatccaagggcatggcccacctctgctcctgtttccaggtccctggtgggggttagttcatgccttcctcataatctgcccactggcctggtcctcaaggtcttcccaactgctcagccagagttgagaaaatgggtcgctccatcctgtttgtgtcgttctctccttcctggcccactctcctgcccacaggtatccaggggctgcctgtagcattagaggacatacatgcacatgcgtgggcatgggacactcacgtagcctccaagcacagcatcaataatgcattctgtgctttatagcatggaaagctgctctaaactttattacacagtggacatgtctgaagcagctcccaaatccacccctgagtgtgttggaattggcaagcctatcacttgggagtctagtttttttgttcgttaataatagatgcttcctgtggccccagcttggcaattttgatttaaagtgatcttaactgaagagactaatggacgggtctgaatttgtgccttttaagcacaaagtattgctcttaattaactggattctatcctttgagcaggcagaggccttcccccaagggcgtcattaacgatccacatctggacatcttccaaagccttcttctgtttcaggccaaccgcaggtgtgttcctgaacacccaggaggctatgagagccacatatgcctcccaaatacacacagtgtgcatgcccagggacatagagcagtgtgcaaagtcccattccatctctctccacctgggagaggatggctcttctgtctgattcatggctcaaagtggtaaaggagctccccactccccgtcccacgcctactcagagtctgcaaatatgtatgcgatatgagagctcgtcagttagctgtcttcagtgtggcgcacatttgaggagtctgactcccctccagcacaggccaatgtgcactgctctcctatctttgtacccccactgttgcactgtgcagaggttggagccatagaagtaccagagctgtgaaaggagaggccccctctcacctctgccctggtctccatccccactttctctaggaagctagtaggtgctgacaggggagagaagggaggggaggggtccagaaacagtggctcatgcctgcaatcctagcactttgggaggctgaggcaggaggatcatttgaggtcaggagtttgagaccagcctgggcaatgtagcaagaccctatctctacaaaaagaaaaaatgtaattagctgggtgtggtggtgggcacctgtagtcctagctacttgggaggatgaggtgggaggattgcttgagcccaagagtttgaggttacagtaagctgtgattgcaccactgcactccagcctgggcaacagagctgagaccctatctcaaaaaaagaaaaaaaaaaagaaaggagagagagagaaagaaaagaaaagaaaaaaaaaaaagaagggaagggaaagcccagaagagtgtggggagaggaggcggccgtcattctggggccctcagtgtgcacaaccagataacacatgctctgtgggcttttgtaccattttgcttgagcataaagaaaggaaggctgcccctaaatagaaagcactctggaggcaaacaaatctgactccaatcctggccctgccactttcccagctgaggacttagacaagcaccctagcctcttggacattctcagagccatctgctgcaagtgggtgctgccatacccaccttactgggcaggcttgggggaccaagggtggtaaatggctcagtctttcatgatgcggccacacagcaggtgcgccatccaggtccatttctttccttcctttcccccaaatcaagttgtcattaaagtactagtccacattaatgaaatcaactgtattaattttctatttgctgctataataaatcatcagaaatttagtggcttaaaccaacacaaatgtattaccttacagttctggaggccagaagccctccataggtgtcactgggctgaaatcaaggttttggcaaggttgcggtcctttctggagggtccaggggagaatccattttcttcctttttccagcttctaaaggtttcatgcattccttggctcatgatcttctatagctatagtcagaaaaattttccatcaatcatcttcaaagccagcaatggcaggatgagtcctcacatcaccttgctctgacaccagttctctgcctccctcttccacatgtcaggaccctcatgattactttgggctcactctgataatctgggatgatctctctattttagagtcagctgactgggaaccttaattccatctacaaccccaattcctctttgccatgtacagtgacatattcacaggttctggggattaggacgagcctgtctctgaaaggctactttacatgaaaattcatttttttaattaagatttttttttcctcttgagacaaggtctcactctatggttcaggctggagtgcagtggtatgatcacagctcactgcagcctcgacgtctctgggctcaggtgatcctcccacctcagcttccctagtagctggaactacaggggtgagcccccatgcccagctaatttttttttttttttttttttgagacagagtctcactcagtcacccaggctggtgtgcagtggtgcaatctcagctcacagcaacctccgcctcctgggttcaagtgattcttgtgcctcagcctcccaaggagctgggactacaggtgtgcaccaccacgcccgactaatttttgtatttttagtaaagatggggtttcaccatgttggccaggctggtctcaaactcctgatctcaagtgatccaccaacctcagcctctcaaagtgctgggattacaggtgtaagccaacatgcccggccccagctaatttttaaatattttttttgtagagatggggttttaccattttgtctaggctggtcttgaactcctgggctcaagcaaacctcccaccttggtctcccaaagtgctgggattacagcatgagccactgcactcggccttaagagaagatttaataattaatactttacaacaagatctggaagaggtgggatgagtaactaaatgaggatacaagtaacccgggtcatatttgctaatacccttggtcacattgaacttgatatcttatcagattttcctaatcagctcctttagcagcagtgttgcagcatcttatctcattttgttttttgtttttttgcctagcacatgcctgtaaatcactggattgaggtgtttagatgtttgttgtcctttggatgcttcttataaatccatatttcatggctccctggaaagtgctatgcaaatgataagctgcaaggatggaaaggaaattgcagtgctcctgaattgtaaatgggcttttacgaggaggtttctaattactcgctctttctcttgaactgaggagttgaagtgtaggtggcagatccataacagataatcatgtgtgtgatgtgacttcagcctgagcgtcgaggaccaagtcacagagcaggaacagccactctccagtgtccttggggctacgtctgaggagaacctgggatttcatatatgacctgcactggctggggggctctcttgacgtaacgtgttccctctgagcatgttacagattctgacattcttatgttccttctgtggagagacatgtacttagtgacctaactcactttagcatatttttgctcatcgtttgtgtagcttaaaggaatcagataattaccccctccccactactttcggaagcacaaatgcaatgccctagaattgtactggggactcaaaaagaaaagagagtagtaaaatctattaaaggggacaaagacagcctatatactacaagctttctatttttatggcagagaatgccattttctaagtaaacagagaactgcatttgacctgcaatatcaaatgcatggatttgatgctttggaaagcaactgttttctgcgttaatctgggtgtcttccgtgaaatgtcctcctgcctttggcttaaacactagctttgtctacagccattccatcctgaacctgcccaatcttgtctgaatcctggtttcaccactgacaagctgtgtgtccttgggcaagttacttcacctgtctgtgcttcagagtcctcatctgtgagttggggaatctggacagaatctaccccatagggcgtagtgaggatgtgttgaattatcccaagtggctacacagagtaagcactcaaatgatgtcatcgttgtcatgattgctgttaccagagcctagagttcattctgatactcgagtctgtggcccatccagcccaggtaaggaatagttggaggagttgggcatgttcagcttgaagaggagacgacaggggatatgggatagttgaatctgtgaagggccccctgggatgaagaactggcatgttctgtgtggctccagggcactgagcaggacccatttgccaaagtctcagggacacagtttctagctatagacagaaaaattttctgtcactcagaggatgaaaatagaatgagcccccttaagaggtaatgagctccctgtcattggaaggattccagaagagctaggtaaccactttaggtgctatcaaggggcttttttctttaaagtcctttccaaaagcttctgagattgcataaacaataggaagccatcttggtgctttaacacaaactctccccagtgatgagggttgagccaaagccagattggcaagcagagaggagacttgtgtacaaggagttcctcgagtcaattgctttttccttgttctagccagccagagggctcctgttggaaaacaggagaccggagaggctgaggcctgaccaaaccagcttctgcaggccagctgggaggccacaactcctacctacgggaaaactgaagggcatctctatttttagattagcaaaagaaaataaatttaagtttgagtctcctttgcaacttttaaaagacatctttattgagatgatcattcacattctataaaattcccccactttgagttacaattcagtggttttagtcttccttgatgattttgatggtcttttcttaaggctcttggaagacccagaagcctctcagacacaggtgggtgtggagggcgtagcacagaggcagacttctcatttcctgggtctcccctttaatgactctcagagacccctccttccccctgcccctggcttctaccccaggggtgtagagttttgccattttccaagcagaacttcatttcctcttctgtgtctacactctttgtgcttctttcttgccagctttttctcctttgcccgcccttccttccttccttccctccctccccccttccctccttccctctttccctccttccccccttccacccttccccccttccccccttccctccttccttccttccttcctgcctgccttccttccttccttccttccttccttccttccttccttccttccttcctggtatgtgactaatttctgtttcaggacataaatgttgtccaggctgttctttggtctttctgttggataatggacatttggcattgagagaggctgctttttctgaaatcatgttcttggggcccagaacctaggtgtgtgcttctgactttgttttcttcctgatccaaattctgatatgtccatttaaattgatctagacccacagggcactgtgggacagatcctcagtggaacatgactctgtaacgagagcattttgttttgtcaaaatgagaacatattattgcctttcatctgattgtaaacataatacatgtttataaaacagtataatgagacaaaaatgtagacactaataagggaaaatctccctaattgtatttctcttcacagagaaagcccctgttgggcatatatactctagtttgtttatttgtttgactacacatatatgtattcttttcttatgtataaaaattctgaacatgcacatttctgcaactactgttttcacttgatgatgcatggacctctctagagtgtacgtttcttcttccttacaaagcagttggcttcgcccagggtgcaccaggacacggttttggctctgtccccagggtgtcacgggaccaggggatgatctcacagggtctgccatctgccctgcctggccggaggctgcatcgagagggccaaggggcaccacgtgtcgtgggtactgtcaaacaagagccttcagagccttccacagtctttcttttgcttcccagcattgcttccccgctggtggactctgaatctagaactagctccaggcgcctctccaaattcagacgggagctggggcactattataatgcaaatctaggcaaagccctcccaataccaggatccagaatggggtggggccctttgccctgaaaagctgtttagtttgaaaatacaaacaggagacagaaaagtttggctaaattaatggataaagttttaacgatggtaaccatagtagggttcatcgacagccagcgatggttctgaacacttgacatgtattaactcacctaatccccacattttacagacaatgcaaaggaggctctgggaggttgagtgacttgccccaaagtcgcacagctcctaagtgaaggattcggagtggactccaggcagcctggtctgactccctgcactgcgctgtgcttatctctggccccaatgccgccatgcagaagtgtctgggggcactttgtctctgtcagacagaattcggagatgtgtatgcttgccctggtatggcacttctctttttttgagacagaatctcactctgtcaccctggctggagtgcagtggcatgatctcagctcactgcaacctccgcctcccaggttcaagcaattcttgtgcctcagcctcccaagtagctgggattatagatgtgcaccatcgtgcctagctaaatttttgtacttttagtaaagatgttgttttgctgtgttggccaagctgatctcgaacttttggcctcaagtgatctgcctacctcagcctcccaaagtgctgggattacaggcatgagccaccatgcctggcagtgtggcacttcttacgtgtgttcagcggacactgtttatcttctgtccctccaagacggtgctgagctcaggtcgttcattactggcagacaactgctgatttccaacagaattgccatcctcttctcccctgcgactttcagagtgtgacctcagactcaaaaattagaagtgaaaacatcttaaaaactatcaccttttcttcctaatcctcctctcccctccctgtcttccttgttgtccccatctaatgaactatcatggcaaaaagagcccatttctggtcattttctgtggcctttcaaactcccacctaccccactgctcctgggtgcattacccgaaagctgagacttcagtgcagaaagtgccaggccctctgtccccccagatcgccttccttgtcttccctgtgcttgcctgtcacattgtgtgggttccagcgctggaaggaatgaggaacagattctctggttctccttttgaagtttaccttcgctccaccacttctgagaccttcccggaagttgccccttgtttctctcctctccagggctgccccagagctgcctctcacctcttcctgctgtcaccccaccaccatcagggcagaagttgggacaaagcctctcctactggctcctgcttttctcccttaggtccagcctcctcttctccatcttcaggagtctccttctccactcacacgtcatgacttcagcacctcgcatcagtccagaatatgactgcttgttcaagtgccacctttctcatgcatttttttctagtgacaatcacagccaccctgtggggcaggagtgtcatcatccccatgtttcaaatgaagaattgcagttcagagagggcaagtgactggcccagcctcaacagctagccagtggaccccaccagggcttctgactccagtccgggttccctttccacccaaatccatggagggagctgagccgagaacaggtgtccttcaggaagacgtgaagccaaagcctccacctccaaactcaggggcccagggagtccaggcacccatccactcacaaggctggatatggtgcattccaggagaggggttgggggcgagtggcctctctgtgtacccgtggggatagatgcgcaagtggcatcgccacatcgtgagtcctggcttcatgggtgagctccaggtccaacgagaagccaagcagggggcccttcaagctcagctttgggcccgggtcggggtacagggtagagcgggcctccccagcccctgccatgaggccaaggcagtgcatcgttcgcagcgtacattcagaaaccaaagcctaggagctggttatcattccggtttacagctgatggaagagcaggtgcttccgagaacccacagtgctctttggccagtgacccaagggtgcctctgagaggcctcgcagcacccggaggtgctgctgaggcaacgccctgactgtaagaaggaccattcatcctcagagagtggccgtgatgctgctgcgacagtcccaccatccctcccgactctcactcccaacagacttcccactgtaaagctgaactctccagcaaatcacctctcgccagactctctcctcactctctctgggtccactagaggttcctcagcctctctttgccttggttttcccagctgtaaaatggagcaaagagggcctatgtacccacaaaggtgtggttggagcgactcctcctacattagggcctcgagtggggcttcatgattggttggtggaggtctccaaacccacccagtgccaccgaaggctgagactgcagatgcaatgccacaggtgtccttcctcagcctgggcagctgaacatcatgtgtaaaacggggataataagataataacagccccttgcacctatgtggctgtgaggattaaacaagataaatgtgtaacagtgcctggctatagaaatatttactcttgttattaagggaagaatatgtgtggctaaaaagggatcgaagatgtaaaagccaatccctccccctctagcatatttaagggtaatgttgagttggtttgtggaccatttgctgcctgttagagctggaaggtagggaccccctctcaacagcgatgctacaaattatacccattggaggtcaaccaaaagacaaagcttattggctggacatggtggctcacacctgtaatcctagcactttgggaggccaaggcaggcggatcacttgagatcaggagttcgagaccagcctggccaacatggtgaaaccccatccctactaaaaatacaaaaattagctgggcgtggtggtgcacacctgtaatcccagctactcaggaggctgaggcaggagaatcactagaacccaggaggtgaaggttgcagtgagccgagatcgcaccactgtactcaaaccgaggcaacagagggagacgcaatctcaaaaaaaaagaaaaaaagacaaagcttgttaataccagcatattgttaagggaataaagtaggctgcagaacaactggtgtaatatggtgccatgtagggaaaattacatgtgtgcataggagaggggtctgcaaggttgtgccctaagatgttagagtggttcctttgcttttctcttttataattttgtatttgacttttaaataaggaccataaatcacttttataaaatacattctctccagcccctactactcctttaaagaataagagtggtttgcccaagaaagacagttttttttgctctggttttcttgattctgacatcagaggaaactgcttctcatccacttggggctctgggttcaggggattcatttcaggcagattaaagtggtgaccaggggcattcgtggacacagggagggacaggagcaccatcagtttgtctcacacaaccactgtcatcctcactgaaggctgttgcctgatcaaaaacagtattgggccaggcacggtggctcacacctgtaataccaccactttgggaggctgaggtgagtggatcacttgaggtcaggagttcgagatcaacctggccaacatggtgaaaccttgtctctactaaaagttcaaaaattagccaggcgtggtgggtgcctgtagtcccagctacttgggaggctgaggcaggagaattgcttgaacccgagaggtagaggttgcagtgagccgagatggcaccaccacactccagcctgggcgaccgagggggactctgtcttaaaaaaaaaaaaaaaaaatatatatatatatatatatatatgtcaaaaatggggtagtttttagatctatagtagttctaaaaacaaaggccatccaagcatgacagatttacaagcactattggctattccagtagttacaatggaggagagaagcttttagttaaaacaaacaaacaacacaacaaacccagaaaccttaggtcaaaaccaaaattgtcctctcagacacaatctgggaattttctcatgacagtgggcattagccaactgacatcagcagcaaccatccgtgtgcacacagtggcaccacctcctcccaaaaagcagccttcatctatgccctcatacaatcgttgattattctctttggattgaggcccggaattatttaagtttcttcttgccagcatgagtctttcctttctgtatgctccttatcttctctctttaatttggcagttctgcttgaaatctgggtctttcattagtagtagttcaatttggttccagaacattctgtggtgtgatgcaatgtgaccagagctcacacttcagagctcttcaagggccagtcttactgagcacctcccagtggctgcctgtgtgctgggcgccacttgtggtgggcaggagagaggaggggacacaaaaggagacacagctccttcttagaagctcaaagttggggaccagctgccacagaagagtatgtttagcatctgagacaccaagatccagcgtcacaagggtgtttattaagcctcctcatctctttctttttctttttttttttttttttcctcaggcagtcttactctgtcacccaggctggagtgcagtggcatgatctcggctcactgcatgcaaccaccacctcccgggtttaagcaattctcctgcctcagcctccccagtagctgggattacaggtgcccaccaccacacccagctaatttttgtgtttttagtagagacagggtttcaccatgttggtcaggctggtctcgaactcctgacctcagatgattcacccacctcggcctcccagtgtgctgggattacaggtgtgagccaccgcgcctggccttgctgttgattcatctatagtatgtttgacttgatgacctccagttaccttagacagaggttctcatctaagctccaactttccatttcctttgtcctcgtctttccccttaacccctccacatttctctcaaaatcaccccacttctaaaaaatactgtttatttttcttttaaatttcaaattatctatactcattgaaataaatcaaaatagcatggaataagcgaaaaaaatggatcccacccttccccactcccattccctagggctaaccatagttaaccatttaatgactaggtttttttgttgttgttattttttatttatttattttgagacagagtcttactctgtcacccaggctggagtgcagtggtgtgatctcggctcactgcaacctctgcctcccaggttcaagcattctcctgcctctgcctcctgagtagctgggattacaggtgcctgccaccacacctggctaatttttgtacttttggtagagacagggtttctcaatgttagccaggctggtctcgaactcctggcctcaagtgatctgcccaccttggccttccaaaatactgggattaaggtatgagccaccgcacccagccctcctgggctcttttcctttagttgcactcgctccccgctcctggagtagagggatttccgagagactgtgggctccagccttcacctaggcccaggactaggatgcctgccctaacatttatctttataccttaaagcaaaacagctggaccataagcattcaagaacaaactgtgaataaggagaaagttctcccaggaaacaagagctttagttctgttgggccagcccttatattccttagctgttaccagtcactgcttgatttaatctcggctatcacttggcctgacaggtctgctgctggtgccaggatgtctgggttttgaagcctggctccattacatacttcctgtgtgaccttgggcaacttactcaacctgtctgttcctcagtttccccagctgtattatgtcagcataatagtttgttgtgtgaattaaatgaggtaataactggaaatgcttcaaacatggttcctatcatgagaaatcctgctttccgcctaaatgtgctggaaaattcctggtggtgcagaacaggagaccagagcaaaggaaagacagggtgcagaagccaaaaattaccttggagaacaaagcgcatgttaaggttatttttggattctaggtttatctctgcttggtcttcagttacctgcaagagatccatttaggggatttttgtttgtttttaacgatagctttattgagatataattcatatgccataaaagtcactcttttaaaatgtttccggtatattcacaaggctgtgcagccttccctgtccttgattccagtctgagtttttaactgaagggataaggaggaccacgctttccccagaccagaaccgcgggccagggggcgattctgctgagtcaccgcgggcgcctggtgcgcggcggcggagcccgggaccttccttggctgccccctagcgagggccgcagcgcagcctgagacacccgccggggccgctccacggccgtcggatttagactggaagctcggtccaggtccccagcttgatgcgcccgcggtgtaggagaccagcccgactcgggcttcccctgagcccctggactcttgactccagcagggcctgggtaatgaacgtcagctcccctttcccaaaggggttgctctgttgggaaggcacccgtttgatacagtagcatagagatgggttttagcatcaaaatatcagaattcaagccttgctctctgcttactagctgtgtgaccctaaaaaggtttctgaacgtctctgagcttcagtttcctcatcattccttctcacggggtggttgtgagcattacagagatcctctctgtgaagcccctgtgagtggctcatcctgagggctgaaataaacatgttattaataatccaaaactggcaagggatgttgactggtccccctcccttgcccaaggagctttctagaacctgagttatcattaccaaactgtactgccttgagtaagaaagttagaaggaatgggaaggatggtggcaggtggaggaaggcggattggtcatcacctccttgcagcaagaaacagccccagatcgtgggaaacctacagacctgctagacagactaggagcaaaagctggggctttaagaatccccagggaggttctcctgagagagtagccagttggattttgtaagcagagatttgtttggggaggaggtgacaacgtagggagcagaggggcaaagctgtcgggaatcctgccttgagggcagggatgtgtgttggggggagttgggtcactggggctcggtggccttgggcaagtttctacctctcaggtcctttacccacctagggtcgccatcctgcccacctcacaggttacagtgagcctggatgcactgtcatgggcaggtgcccaggaaaatggcagacatgttccaaacagcacgcagcattccccagtgatgcccagggtcaccttggaggtgggcgagatgcctggggtttctcgtccaccccacaacacctcaggggacagccaaagctgtcccttcaggtaagctgcacagaagatgtgaactctgctgcaaagactctattctttgggagcaaaagggacccagggtctcacctgcacatccctgtccctgagggcctaggggttcttggaggccccagccttggcaaaatgaggaagaaggtgaaggttgtctgggcccctgccaggctccttcctcggccacgcactccccttcctgcacacacacccttctccctccaccccatctccattgttgtcagaaaagtcacaataaaaaggtccatattgtctagttcccatacttttaatttttaaaattttatttatttatttatttatgtattttttgagacagagtcttaacccaggctggagttcagtggcatgatctaggctcactgcaacctctccctcctgggttcaagtgattctcatgcctcagcctcccgagtagctgagattacagatatgtgccactatgcccagctaatttttgtatttttagtagagacggggtttcaccatgttggccaggctggtctcgaactcctggcctcaagtgatctgcctgcctgagcctccggaagtgctgggatttcaggtgtgagccaccgcactcggctccacacttttcacttattaaaagactgtggtgtccatcaatggatgaatgaataaaccaatgtggactatccctcccattacccaaggaatgaagcacggagccgtgccaagatctggattcacagtgaaagaagccagtcaccaaaagccacgtgctgtgtgacttcccttatacgaaatatccagaagagatacatccatggtgacagaaagtagatgagcagctggggactggcgaaggggagaagggggagcagctgtctatgaggtccagcctttcttctgggtttggtgagaatgttttggaactagatagaggtgatagttgtacaacattgtgaatgtactaaatgccactgaatcattcattttaaatcgttctttacgttgcatgaattttaagtcaatcaaaaacagttgtttgaaaagagaaaagcctatgggtagcggcagcagtgattggatttatgattcgattccatggctcatccctcccctgcctcaccccctcgccctccgacgtcttcttcttttactctgaactgttatctttgttctcatctctctctctctctctcaaccctgcagacacttttccctttctttgtctgcccccaccctccagatttccgtgtctccagtgtctccctacgaggcatgaattgagactgggagggtgtgattctgaagaaggcaccaacagtgactcagctagccccttcccccaccccgccccccgggcctcaatttagctaaaaaaccacagggacggactcaggaggcaatacctttccaagggtccctaaaaaatgtcccattttagtgtccaggtttcactcaactttagtgcctcccctaaaatgtgttccttacctcccaccccactgcatctaagtcactgcctgagaaaacaggattgaggaaaggagaaaggaagagagagagagaggaggagagagagagagagggaggaaggctgatggatttagaaaagaagaaaacaagtggtctgaggaaaacagccttggtgtgtttattttcctgtctgtgtatcgcttctcggccttttggctaagatcaagtgtattttcctgtctgtgtgtctcgcttagattacagggatctgtgggtgatgacacgtctggtccaggctgcgtagtcacctcaagggcatgcttattgatgtgtttttcaattcactatctttgcatgggagtcccaggccaagaggcacagctgcgccatttgtctgttggtttagatatcctttatccagttcttccagagaaatcatcctgcccttctggaggaggtgggcagcaggggtcagagatgggagggaaaggaaggagccaggtccttggctaggatgccagggtcccctgcctctcacctggcctgggctggaggcctcctgctgtcctgtcactgatcactaccccgccccagcctcctgagttagaagacacaggctaaagtagagtatttcttcattgaaaaacccatacaaaataaaggttcataaaaaataaaaatttagactgggtgctgtggctcacacctgtgatcccagcactttgggaggccaaggcaggtggatcgcttgagccctggggttcatgaccagcctgggcaacatagtgaaaccccatctctacaaaaaatacaaaaaattagccaggcatggtggtgcatacctgtggtcccagcttctcagcctatggacccacatagaatacaatgtcagcataagaagggagccctggggtcaccaaatggtttgggcggcaaagaacctgaaggttgagagaagtggcttggttacccagctgttggatgtgagacctggccactgcttcttccataccctagacctgcaccctgacatctcaagtaaaaagttgggggatgttttatggtccaggatgaaggaagggcagtgaggggcagcggagcatcactttgcatttctgtctgcctcttactggctgtgtgacctggggcaggtaacttcccagactcctgggaatcataacacctatgatgatgatgatgatgatgatgatgatgacacctacctcaaggattgccctgaagggtcacagagatgcctgcaaggcacctgcatggagcaagcgccccttctctggcaggtgctgggtgagcactacctgctgccaggccctggggctatggcactgcgtgaccctgcaagtcctacctggcgaagctgtcgttcttgtgctcagtcagtgttggttgtaagactgagaagagtcacttcattttgctctccagggacatctttctgggtcctattttctgcctatgtcaagtagcgcctcaaggatgctcctgaaaatgggcttgtctttcttaacatggcaggtaggtcccaaagcattagcatggggcagctgacctagcccagccaatgcagtgcagtgactcttgcaaccgagtctaatcagaaggtccatgaacctacgagcatttcctgtcccaggatcagggtggaggctgagcctccctgcttagagattcttcccatgcattccacttttttccccaaaagaaaatattgacccttgagaggcacacagtttatttattttgcatagtaaatagtagcctgtattttaaggatgagttgatttctgcatcagcccctgtaggtcatcagccttctattggtgcatctgactctctctagccctgcagggatggtggagggggaggggaaggagggatctttattggaaaccaggacagtgagactcattgccctgtcatctgctctgtggtgctgaatgaggcagcccaacagagaaataccctgagcgagcatccccagcctccaaaacagtggcgcattgccctgagtcctgggaatgacctttgattctcctgctcctgacttggaacccatggaaacctctagaagcagctgaggaaaacccaacatgaaaagcagaactccacactgagaatataggaggtgatcggaacatacaatgattcttgctaagaccgattcacagtttttcttttttttcgatcgaagaaatactggagaagcctaaagaaggagtctaaaaactctggcacgtgggccaaaactgtccttgagctaagaatgattttcacatttttaagtggttgaaaaatgaaataaaataagatgatgttttgtgacacatgaaagctatgggaaattcaaattctaatatctataaatagtgttttatcagaacacagtcatgctcatttatttatgctcgatggctgctttcccgctacaattacgttgagcagttacaacagagaccacgtggcccacaaagccttacaatatttactatctggccctttccagaaaaaaatgtgccgactcttgaccttaacctcagcaatttgggaggccgaggcaggcggatcgcttgagctctggagttcatgaccagcctgggcaacatagtaagactccatctctacaaaaaatacaaaacattagccaggcatggtggtgcacacctgtggtcctagccactcgggagactgaggtgggaggatcgcctgagcccaggaagtcgaggctgcagtgagctgtgatggcaccactgcacctcagcctgggcgacagagcaagaccttgtctccaaataaataaataatgcaaagtaaaataaataaaaccatataaaaaggaatcaatttaaaattataatgaaagctggccgggcatggtggctcacgcctgtaatcccagcactttgggaggctgaggtgggtggatcacgaggccaggagatcgagaccatcttggctaacacggtgaaaccccgtctctactaaaaatacaaaaaaaaaattagccgggcacagtggcgggcgcctgtagtcccagctactcgggaggctgaggcaggagaatgtcttgaacccgggaggtggagcttgcagtgagccgagatcgtgccacttgcagtccagcctgggcgaaagagcgagactccgtctcaaaaacaaaaacaaaaacaaaaacaaaaaaaaattataatgaaagccaaggggcatagtagaacaaattttctagagctcattaagtcaaatgagtcaccagttagtaaaacgcagtcacggggaagagagggcaggattctttgaagcagcggctctcctaaaaacaacccacccttgtccagctgccttccctcctgagggtgttccctttgactgtgtgacccccatcccctatttcccaaccgtccaagcccacctctagcataatacgagcttttaatccctctccctgaccccaacccgattttgaagcccagtctagtattttctcaaatacacttcttggctccattccttcctttccatcacctctgccttttcactgcatgcttggaccactgcagtcagctccctatgaacagttgctctctacccatccaatcggccccgcctgctgctgccaaattcaccgagggcacctctgtggtgctgcctgtggacaaagtccaagccagccacctcacccacctacaggtgagtggggagcagccagcgtgtccagtggtttaccccatcgccacagacttggtgatgtgtcgatgtgcagagaaggggtgttggcagccacaacacaagcaaccccgccccatgtgagatctaagatgggcgtgctgggagccacctctgagaatccaacagaaggcagaggggagaacggctcacacggcacaaacactccttccttttttttttttctttttcctttttgaaaggagtctcactctattgcccaggcaggagtgcagtggtgcaatctcagctcactgcaacctccgcctcctaggttcaagcgattctccagcctcagcttcccaagtagctgggattacaggtacactccaccatgcccggctaatttttgtgtttttagtagagacggggtttccctatgttggccaggctggtcttgagctcctgacctcaggtgatctgcctgccttggcctcccaaagtgctgggattacaggtgtgagccatggggcctagcctccttccatttaaatgtatgcctaatttgcccattgagaacggctgagacgcattttaagtggccagggtctacttagagttagtgctcatgaccaggcccaggtcaagcctggctggccagatggtgcctttgacctgctctgtctctgtgcaaaggaatgagctgaaggatgggggtgcagtgtgtgggcagtgggctggggctggcaggactcagtgactaagggaagagaactttcctcactaccagcctgtcttttcagggcaccgcggggggctttgggacttggtgatgaacacagcacagagagctgtccagcatgcgggtccctggcttctcacacttcccaggctccttcagaggctctctccaaagggagctgctctctctagaacccatgaatttggaatataggcaaccactgcattggggaccactgacctcaaacatagagaccagagcaaatggggctcatcacgtgaaactcatctggaactctagcaggttcttttatatatatatatatatatatatatatatatatatatatatatatatatatattttttattattatactttaagttctagggtacatgtgcacaacatgcaggtttgttacatatgtatacatgtgccatgttggtgtgctgcacccattaattcatcatttacattaggtatatctcctaatgctatccctccccactccccccaccccacaacaggccccagtgtgtgatgttccccttcctgtgtccaagtgttctcattgttcaattcccacctacgagtgagaacatgctgtgtttggtttttttgtccttgcgatagtttgctgagaatgatggtttccagcttcatccatgtccctacaaaggacatgaactcatcattttttatggctgcatagtattccatggtgtatatgtgccacattttcttaatccagtctatcattgttggacatttgggttggttccaagtctttgctattgtgaatagtgccgcaataaacatacgtgtgcatgtgtctttataacagcatgatttatattcctttggttatatacccagtaatgagatggctgggtcaaatggtatttctagttctagatccctgaggaatcgccacactgtcttccacaatggttgaactagtttacagtcctaccaacagtgtaaaagtgttcctatttctccacatcctctccagcagctgttgtttcctgactttttaatgatcgccattctaactggtgtgagatgttatctcatggtggttttgatttgcatttctctgatggccagtgatgatgagcattttttcacgtgtctgttggcgaactctagcagcttcttttcacaagttcatggagagaggtttcccactgagggaatcacatctgtctgatcaaaagaggcttgggaaatggctctcctgttcattccctgaaaacctctgatggaaccactgccactgtggcagccccagcactggcaccccagccatgattggtgccccagccacatctctgctgtgagccccagagccctggttaattaatcatccacgtgttgatggggagaggcccattcacaaaagcgacataaagcccagggagacgtggccgtggcaagaagggtgtgggactacattccgcccccaactgagagattcagaaaccagaaaaaaatggaaaaacatactgtgctcttgggtgggaaaactaaatatcatgaagggagcaatttttatagttttggcctataatacaattccagccgaaatcccagtggaactttgagaatttgcaggaaaaaaaaaaatgtctaaagtacatctggaagacaaacttacaagaaggtcaaataattttgaaaaagaaaatgatatctaagcccacctagagaataagacttgagatccaaagctaaatcaggaggctctagcaaaattgacagataagcaggacagagtgcatggtgcattcacctggggaagagggcagattggtctacaaataggcctgggtccactgactttagctgttatatttggggagaaacttttcaacctcactccatcttaaacctaaaaatattccagatgaattaataaatataaaaaattagaccactaaaaatgtagaagaaaatggatgatctttctataccatagagcaatggaataaatcacaaaggaaaacagatttgactatataaaacttaaaccctgcccatcaaaaaccatcagaaaccaaaataaaaggcaaccaactggagaagatagttgccacaaatatgatcaagggttaatgttattcataaattaagagcccacacaagtcattagaataagcactgagacctgaacagacaagcaaaaagaatgagagtgggtcggcgcggcggctcatgcctgtaatcccagcactttggaaggctgaagcaggcggatcacttgatcccaggagttccaacaccagcctgagcaacatggtgaaaccctgcctctacaaaagtcataaatattagccgggtgtgatggcacacgcctgtagtcccagctactcaggaggctgaggtgggtggatcacttgagcccgggaggtagagtctgcagtgagccaagatcacaccgctgcactccagctggagcaacagagtgagaccctgacttaaaagaaaaaaaaaaaaaaagaggagaaaaatgctgatctcactagtaattaaaacatcaggccaggcgcagtggctcacacctttaatcccagcactctgggaggctgaggcaggcagatcacttgagatcaggagttctagaccagcttggccaacatggtgaaatcccgtctctacaaaaaatacaaaaattcgccaagcgtggtggcacatgcctgtgatcccagctactcgggaggctgagacaggagaattgcttgaacacgggaggcagaggttgcagtaagctgagatcgtaccattccagtccagcctgggctacagagcgagactctgtcccagaaaaaattaaaacatcacatatttaaacaactctaggatatcatttaaaaaaacattaatagactgttttttagagcacttttaggttcacagtgaaactgagtggaaggtacagagacttcccgtatgttccctgccctccacgtacagcctcccccactgccaacgtcctgcaccagagtggtacacttgttacaaccaatgaatcctcattaacatatcattatcacccaagttcatagtttacattagtaaaacatcatctttcatctataagcacaaaaattttttggcatttatttaggtgtatgattaactcagtgttgacaagactcacacttcatacccacttgcactgcatctgagaagcaattggtgtctacagccgctacaccctcaacaagcccgatcttgtttgaaaagcaattggtgatgcttctcaaaattctatggacaaagtcagccgggcatggtggctcatgcctgtaatccctaaactttgggaggccgaggcaggcagatcacctgaggtctggtgaaaccctgtctctactaaaaatgcaaaaattacccaggcatggtggctggggcctgtaatcccagctactcgggaggctgaggcaggagaatcgcttgaagcaaggaggcggaggtttcagtgagccaagattgcaccactgcactccagcctgggtgacaagagtgaaactccatctaaaaaaaaaaaattatggacaaagtttttcaaaaagatatttaatgcaactttatttgtaatattggaacatctgaggccatttcagtgctaactattaggggatggttaggaaaatatggtacatatgtggaaaggaacatttggtagttagtgcccctgatgtttacaaaggcttttagtgaccaacaaatgctcatgctataatcttatgtgaaaaaagcaagtagcataattgcaactatatttttaatgcatagaataaaaggctagaaggaaatatcacagatccttgacatacattcccaaacctttgtaaatccgcggattcatgaaaacagacacatttgcacaagtgcctgatcttttctgttatacattcattagaagtcaagccctggtgccacaaagtatctgccttttcaaatgtgatcagaatgttctcttttgcttcaaggccatttttcacgaagcagtggcatttttgcctcttcatcagagtcaccgtgtgccctggaggactgagaacagcagagccgttttaggatgggacagggcagccaggaggattgggctcactccctactgagtgcctcactcccgtacagcccccatagaggaagaggggttcaaatttattcctcagccagatggcatgtgccgcctgtcctggaatttcacatcacttatgatggaccaaaattccaaaagctgaatccatgattgtcaaagtctggtatggcaggatgtcaacagtaatcgtttctgggcagagggatgattttctcttcccatcttgctttgtataaatacattttctataataaggttgtattacttttctcatcaagaaatagcaaagtactgttttactcaaaatatgaatagagccaggcatggtggcagcttatgcctgtaatcccaacactttgagaggcggatatgggaggatcactttagcccaggagtttgagaccagcctgggcaacatagtgagacccccgtccccactcccccaaagaaaacccacaaagcatttatcctggattattcacaggggccaaaaaaaaaaaaaaaaattcaggcctcctatagccatgagctacgaatatgaaaatatgcaaatgtgtaagaaaagccagcacatccgatttttacttttactttcacacctctgtccaccatgttccaagagaagaaacttggtcattgaaaggaatagatcaaatccaaagaacaaaaccactgtgctcattaaacttcttagtgttcacaaagctttagctgcaggttgaatggggcaacccgaattggctggctcacctgggctgcagggagcagagatcgcgacactgcactccagcctgggcaacaaagcgagactctatctcaaaaaaaaaaaagttcataaattcaaagttatgaattatttttaaaataataataatttacaataaagatgaggacaaagtgtgagtaaatggtggtttctatccagctctgttgagctgaagtggcatctccctgctggggcttttggggaagaagggtgtgtgttgctcttcagatcccaagcctcatgcccctactgggccctgtggggtgcttctcagcccaccaggagagccaccgttggaacacacacgtgggggacctggtgggtgccggtgtggtgaatgggggccacagcctgactccaggaagccagcaaactcggagctggaggagtcaggacacccccgatgagtcaagagttggttttgctgccagttgacatctgattgaaccatctcttcacttctccgtgcctcactttccttaccagacaggctctgctgatgctgtccctctcctgttcagtcgtgccctcaccgttaaagagaaagagcaaactgctgggcagcagcattgatttttttaatgaagtggaaagagagctgggaataacaagtcgggcccacctcacctgcctcacctggtgggtttatttgttttgtttttttttttttgttttgagacagagtttcaccctgtcacccaggctggagtgcagtggtgtaatctcagctcactgcaacctccacctgccaggttcaattgattctcctgcctcagcctccccagtagctgggattacaggcacctgccacatgcctggctaattattgtatttttagtagagatggggttttaccatgttggccaggctggtctcgatcccctgacctcaggtgatccacccacctcggcctcccaaagtgctgagatcacaggcgtgagccaccatgcctggccgtcacctggtggtgttgaatatgaactgctgcggtgttggtaaattaagcaagcagatagatgtaaataacgcttgggcaggaatatggagcacgggatgaggatgggcggccaactgttagagagggtagcagggaggctgagatctgcctgccatgaactgggaggagaggctcctctctctcttcacccccactctgccccccaacactcctcagaacttatcctctcctcttctttccccaggtgaactttgaaccaggatggctgagccccgccaggagttcgaagtgatggaagatcacgctgggacgtacgggttgggggacaggaaagatcaggggggctacaccatgcaccaagaccaagagggtgacacggacgctggcctgaaaggttagtggacagccatgcacagcaggcccagatcactgcaagccaaggggtggcgggaacagtttgcatccagaattgcaaagaaattttaaatacattattgtcttagactgtcagtaaagtaaagcctcattaatttgagtgggccaagataactcaagcagtgagataatggccagacacggtggctcacgcctgtaatcccagcactttggaaggcccaggcaggaggatcccttgaggccaggaatttgagaccggcctgggcaacatagcaagaccccgtctctaaaataatttaaaaattagccaggtgttgtggtgcatgtctatagtcctagctactcaggatgctgaggcagaaggatcacttgagcccaggagttcaaggttgcagtaagctgtgattataaaactgcactccagcctgagcaacagagcaagaccctgtcaaaaaaaaaagaaaagaaaaaagaaagaaagaaatttaccttgagttacccacatgagtgaatgtagggacagagattttagggccttaacaatctctcaaatacagggtactttttgaggcattagccacacctgttagcttataaatcagtggtattgattagcatgtaaaatatgtgactttaaacattgctttttatctcttacttagatcaggcctgagtggcctctctttagcaagagttggttagccctgggattcttactgtagccacattaataaacaacatcgacttctaaacattctataataccatcttttggccaaattgacttcgcctcttcctctctctttccaaatgaaatgtgtttcatttcactgtcagaccacatggttggggaccccacagagcacacagccctccctctgccttcccatgctggcccttcacccactgctggagtgccaggttggtccaagggttggaccaagttgtctgaggttgtctcaaggttggtcgaggctgtctccgcgctgggttgtgctacaaggagcccttctttccatgggtgtggctggcagtgagtgctcacagcaacagcccacagtgcagcccgagggcaggatggactcagtccctgcctccatacccatttctaaggaggcaaaatggcaaacactctacttttctcttttaatgctaaaaataagaaaacaccttgcagcccagggtatgggtagtgcatggaagccgtggagttgtgaggtgggaagtgacctctgctggatatgtctattcaggaagattgctggagtgggtggggtctctgggaggtcccctgagtgtgggaagctgggaccaccagctttctcgcacagggagtggccatcccagcttggagaggttccaggactggttgggaggcacgtttcagatttctatctgttgaatcagcgaagatattggattatgaggaatttgggaattaggaaagtgggtgcaggtgggttgggggtaggtgaaggaagacatgggcgtattgggggagcaggggctgctcagaggtgttccagaagctctgggtgaggaggtgagagggaccggggaatgcagctcggcccagcctccctgcctgaggtcagccatcacgtggtgatggcaagatggaaatgtgctttctgactgctccagccagtgctgccagattcagctccccagggagggcacctgagaggctccaagccaggagatctgttttctcctttgttttgtttttttttgttttgttttgttttattatactttaagttctagggtacatgtgcacaacgtgcaggtttgttacatatgtatacatgtgccatgttggtgtgctgcacccatcaacttgtcatttacattaggtatatctcctaatgctatccctcccccctccccccaccccctgttttctcctttgaatccttcttagaggccgggcgcggtggctcacgcctgtaatcccagcactttgggaggctgcggcaggaggattgcttgagcccaggagttccagaccagcctgggcaacatagtgagacctcgtctctacagataataattttaaaaattatccgggcatagtggcatgcacctatagtcccagctactcaagaggcagaggcaggaggatcacttgagcccaggaggcggaggttgccgtgagccaagatcccaccactgcactccagcctgggcgacagagacccccatgtcaaataataataataataaataaatccttctcagtcccttcctcactgtgtccccctccactgaatttttccacctcctctcccacttcccccactcccgctttccctctccttctctccccactccatctttttctttctctgctgtttctcgtccctccctcctctccatcccacaacactgcctaccctgtccctgccccaccctggtgctcaggatgtgtgaagtgaggggtggtagcccccaagacctcaaccccgaaggttagcctgttgaaaccactttctcccagctgcccccctggcagttggtgctgctgggggaaactgggattgggggccagattttgcctcttttcctgacaaagagagatgaagagttctctcaccaggtgcctgggactggggtgtgggtgtcccagcctatcccagcgcatctgttctgcatcatgattaatagtgctgctttcagccgggcgcggtggctcacacctgtaatcccagcactttgggaggctaaggtgggcagatcacaaggtcaggagttcgagaccagcctggccaacatggtgaaacctcgtctctactaaaaatacaaaaattaaccaggtgtggtggtgggtgcctgtagtcccagctacttgggaggctgaggcaggagaatcacttgaatctgggaagcagaggttgcagtgagccaagatcgtgccactgcactccagcctgggtgacagagtgagactccgtcctaaaaaaaaaggagttttgctctgtcgcccaggctggagtgtagtggcgccatctcggctcaccgcaacctgcgcctcccgggtgcaagcgattctcctgcctcagcctcccaagtagctaggattacaggcgcctaccaccacgcctggccagttcttgtatttttagaagagacggggtttcaccctgttggccaggctcgtctgggactcctgacctcaggtaatccgcccacctcagcctcccaaagtgctgggattgcaggcatgagccaccgtgcccagtcaactccttctcaaaaaaaaaaaaatagtgctgctttctctttcaagtgtcctgatttgggtgatagtaaatgccactctacttataagggatctacctcagaatgctaattgggacatttttgtagcactctactgttggcagcaggtgatgctcacaacagcccgtgagggtggatgacgtccgcttcacagatgacaaaggagcctcatgctcagaccgtgggctgccagagcaggtccatggctgcagccccacatggaccatatttcccccttgtcactctttccaccaagctcccttggaacttcagttattaagctctcttgggtggaatccaagttagaatcacaacatgtgcctcatatggattgtgccagtgaaaaatgacattctatttagaggcagggcagcctggcttagagtcagtttaaaatatgtattatgctgcaacaaatgtaccatgatcctgtaagatgttcacaacaagggaactggatgtggggtatactgtctgtactaacttcacaagttttctgtaaatctaaaactgttccaaaataacaagttcgtttaaaattaactccaggagaccaggtacggtagctaatgcctataatcccagcacttcggaaggctgaggcaggtggattgcttgagcccaggagtttgagacaagcctgggcaacatggtgaaatcctgtctctaaaaaaaatcacaaaaattagccaggtgtggtggcgcattcctgtagtcccagctacttgcggggctgaggtgggagaatcatctgagcccaggagtttgaggctgcagtgagctgtgattgtaccactgcactccaacctgggcaacagagcaagaccctgtctcaaaaaacaaaaatgaaataaagtccaggaaagaagtaggttttaccactcttattttctgaagagaaaactaaatttaatgtgtaaagtgaggacaagttcaccaagttagtgtttgagttgcctaaaatatgtttgctaaaactattcaaagctttcacataaaacatgatcagaagttctatgccaaaacatatgtgtgtgtatatatatatgcactatatatactgtatataaaaatgcaaaatctaaattgccaaccttttagaaattgctctgaaaggaaagcatttcaagataatttgcttacccaaagaatatactttccaagaaagcaagtaatacttaaggtgttcataatcctcatcaaattaattcttgctactgaaagcttacaaggagctgttttgatgtcgggtgtgacaggtttgacttggcagaaggtgtcactttactaacaacattttaaataagtgacagaagacaagaaactacacgttaaatgccagaacaaagagtgtctaagtggatgctaagagttgaaatatggctggatacctgcccaagagagctgaaaagtagatgaaagttggttacctataaactagtgcaccctaatgaattaaaaggtgttgatgagttaacttgttatgccttccagataagacatgcaaatggggcttcttcctccttcactacttccaagggatttaacaaggagaccaatgcaaatgataaggactgtagggctcaagctggggacagattggggaaagggggaccatcatgcccatatagatgtccctgtgccctggcagtcaaggctgctgaaaaataacaaaacccagaagtctgcgtgatgctgcctctccatttgtccaaagccttcttgcggcagtttgcaggcttttgcaaaagctccaggaccaaggagctatgttcatgctggaagcttgttcaggattagctgttctttgtgggatgggtgcagccagggccaggtgtccagggacagtgttttaacaaagggcatgaggtgtctgatctcacagtggaactccacttgcctttttttcatcttctcattctgcttcatgcacagaaccagccccatcctgaaactgactctaaattactcccgccccaggtggagtgcctttctcggagttcaacagagccttcctgtcgcccaagggacaactccactgaatgcccaagccacacccaaaacctaacaagtaaaaaccaaattctgtgctcccccatcctgggccattcctggtttctctactgctgttggtgataccaccatcagcttgtccatcatgaccctggccagttcctcccacaaccctccacagcacccagggacctcacctccattccatccgacacagatctcctcaccacaaaccttggttttgcaacagcagccatgagacctttacaccctccgcccttcatcctgtcccccactgaggccccagagccattccttaaagcagcgcgccacaaactataacccacaagccaattctggtacccagcctgttttgcacagccagtgaactgacaatgatcttttcatacagccagaaaaacaaaacaaaacaaaaaacaacaaaaaaaaaccccaccattctgagcatgtgacttccatgttcaagatgtctcatgttcagaaaggcccctggaaaaggaggaaggggagctgggcacaaagggagaccctctcagctgagctcctcccatccagacattttcctggacttcctatccaatgacttcccttagcttcttatcagccacccctgtctgcccaggaggctggaagatgtggccttttaactgggcacagctctgtcctctatcatatcagggctctgttcccaaggagggtagagagaatggacaccaggtggaccctcagcagtctgtgccacagagggagtgtttgcaatttccagactaaaagtccccatgtgcttgacggggtatgtgactacaacgtgatgcttgacttttcctcatatgaccagagccactttgtccatctggtacaatgtcagctatctgctaggggccctccaggattcccagtcaattccatatctgcatcaccaccattggcactaaataaaataaaatactcaagttcctgctggtgagcatgagcagtgctacactgggcccttcaaccaaggtgacatgataatgactgaaaataatcactgccacttattggggacgtctcatctgccaggcatggtacaaagtgctttaaataagcattcaacaatttcatgctgacagaagccctgtgagccagtggagctactactatgcccattatacaggggagaaaactgaggcagagagaggttaggtaattcgctcagcctcacacaaccaataggtggtggagccaggatttgggccccatctgcctgactctctagaggctctatcttccagtcttccagagttgagtctaagccatgaataggacaattagacagcagaggaaacccattcagccaccatgtgcatgaagagtaaggaatttctgtcatacagaggggagtgaattcactgagctgagagctgaggaaccattgatctgatggctgagacaccactgggaagactggagaggcttttctgggcatgcagtgccaggcacaggaggagctgagggaagatgactaagaggtactggcaaagaattcagaaattctgatggaagctttacatgttaccatcacatccatccatctatccacccatccatccacccatatcttcctccctccacccaatcatgcatacatccagtcatctatacaccacccacccacccatccatccatccatccatcccttcatccatcccatcatccatccaattatacatacatccaatcatatatctgtacataatccattcttccctcggttcatccatccatccattcatccatccatccacccatcccttccttcatccttcctatcatccatccaatcatatatctgtacataatccattcttccctcggttcatccatccatccattcatccatccatccacccatcccttccttcatccttcctatcatccatccaatcatacatatatccaatcatacatctgcacatcaccagctcatccatctatccatttatccatccatccttccttccatccatcattcatccatcatacatacatctaaccatacatctctacatcattcattcttccatcgattcatccaattatccatcattccttcctccatccatcccattatccatttgatcatacatatatcatctatacatcatccattcatccatccatccatccatccacccatatcttcatccaatcaatcatacatacatcgaatcatctacacatcacccatccatccatccatccattcatctatccacccatccatccatccatccatccattcatctatccacccatccatccatccatccatccatccatccatgtaaccatccagtcatatatccaattacacatccatccagttatacattcatacatgcatctaatcattcaattatacatacacacatccatataattctacatccaattatacctccatccaattacacattcatacacccacctaataaattattaattcatatatccatccatataattatacatcaattatacatccatctaatcattcagtaattcacccaccatccagtcatctatccaataatacattcatccaatcatccatccatccatccacccattcatccatccatccgtccgtccacccatcatggtatgagccatgatttaccacgatggtcccctgtggacagcccaggtggggcagaactgaagggaagcccagggctgcccccataaacatttgcctcctttacatggatgagaactagatccacatgtataaatcctcatgatttgaaggtgcttttaccaacattcactcatgggattctcccaggagctctaggaggaggcaggtagagttgaggtcatctcacgcattttacagatgaggaaacggaggccctgagaggcaggtccaaggccacctgaccagaaagaagtggaactgggacttgaacccagccatcttgccccttggtcccatgctctctagcctgtaactcctgcttcctggtggggcatctccaggaggaccctatcggctggccatgggcctgccctggagtcttttgctctgtgtggccatccttcctccctcaggagagtgtgtgctcccagagcacaggctgtatcttctgagcattttgtcccttcccagtacctagcactcagctctgtatacattgggctctcaagaattctcaaccttccagagtgtaaggccttgacctgctcagccctggatactgcatgatgcattgataagcccataaaataaccagggcagattgactcccagtggccaaagtgccacagggaagggacaattcagcccttctaggaggaggaggaggtagttttctcatttctattaaggcaacaaaagctgccttactaaggacattcttggtggagggcgtgactgtcaaccactgtgatcatttgggcctctcttgcccaggcttcccattctgaaaggacagttttattgtaggtacacatggctgccatttcaaatgtaactcacagcttgtccatcagtccttggaggtctttctatgaaaggagcttggtggcgtccaaacaccacccaatgtccacttagaagtaagcaccgtgtctgccctgagctgactccttttccaaggaaggggttggatcgctgagtgtttttccaggtgtctacttgttgttaattaatagcaatgacaaagcagaaggttcatgcgtagctcggctttctggtatttgctgcccgttgaccaatggaagataaacctttgcctcaggtggcaccactagctggttaagaggcactttgtcctttcacccaggagcaaacgcacatcacctgtgtcctcatctgatggccctggtgtggggcacagtcgtgttggcagggagggaggtggggttggtcccctttgtgggtttgttgcgaggccgtgttccagctgtttccacagggagcgattttcagctccacaggacactgctccccagttcctcctgagaacaaaagggggcgctggggagaggccaccgttctgagggctcactgtatgtgttccagaatctcccctgcagacccccactgaggacggatctgaggaaccgggctctgaaacctctgatgctaagagcactccaacagcggaaggtgggccccccttcagacgccccctccatgcctccagcctgtgcttagccgtgctttgagcctccctcctggctgcatctgctgctccccctggctgagagatgtgctcactccttcggtgctttgcaggacagcgtggtgggagctgagccttgcgtcgatgccttgcttgctggtgctgagtgtgggcaccttcatcccgtgtgtgctctggaggcagccacccttggacagtcccgcgcacagctccacaaagccccgctccatacgattgtcctcccacacccccttcaaaagccccctcctctctctttcttcaggggccagtaggtcccagagcagccatttggctgagggaaggggcaggtcagtggacatctgatcttggtttagtatccttcattttgggggctctgggtgtggcctgggcctctggactttggccacggtgtttgttccagcccttctcctaacctgtcctttccagacactcggcatctaggttattagcacctcgcatactttctgacatgctcctcagtcctgattttgaccatcttctcttgcttcccatctgtgtcagtcaagactgcatttggctgtaagaaacagaaaccccaactaactgtggcatttacatgaagaggtttacttttctcacataatcagatgtctagacttggccagcacctcaagggtcattgatgctctcctgtctttattttctgtcatctttagtggttggattgttgcctcatggttacaaagtggctgctgcacttccaggcatcacatctgcctttgaagcaggaacaagttgcaaagtaaagtggccaaaagggccctgaaactaaatgtgtccccttaggaaagcaggagttttcttgcaagtggcaatcttctgcttatgtctcattggccagagctgggtcttacggccaccccttgctgcgagcaaggctgggacattgagcattttgccgtccaacctctttagcagaataaaccaagggggaagaacgttaatagtggcttttgagtcactagttggcagtatctgcccctctatctttccatcctccccatggagtttcaaggttcctttctcagtacttcttcaggctctgcacgttcatttggatcttgtgtcttggggtgaaaaactggcccaagtgtctccccaagcatccacctttggattaatttggaaaatggctgtcaagtgcccgcctcttgcttggtataatgctacagctttagaggacgcagcaggcatgggccttgccgctgaggttcttagcctcatgagaatatccagatcagattctcttggctccttcttagagccagtgatgcaagacacttcctgctcatcttgtcgggacggttttacaagttgcctgccatcctgagaaagtctacaaaacgatgccagacctcatgccagcttcccaagccttgactctcagtgctccctcaacaggattctggaagaatctcccaaacaagtcgcaatgccctctggaccctgtgcaggcatgagactcaagagcattggctcccacccctggtggagggaacactgctggggctgggatcttgcctggttgctccgcctgcacccaagacaaccataattaaaatgtccttcattgaacttggaaagccttcaaagctgacaactccttatgtgtacccggaaaggcctgggagtgtgccagggcattgctcgggagggacgctgatttggaagcatttacctgatgagagactgacagcagctcctggtagccgagctttccctcctgcctctgctgtgaaggtggacccatccaacagtcaaatgcctgactctggacaggagcggacctatttattgccatgcaagggactctgcacttttgaattgtgggtcatgggcttggatttaggggttagagctgggagaagtcttggaagtcacctagagatgacactgccattttgcagatgaggaaaccgtccaatcaaaatggaccaaggacttgcccaaagcctcacagcaaaaccataggcccccgcactaaccccagagtccctgtgctgtcttaaggatcatatagttgtaagcaatcatctggttttcagtatttcttcttttaaaatgcctggggccatgcccagcagtctgtttcactgcagcgtttacacagggctgccgggctttcctggtggatgagctgggcggttcatgagccagaaccactcagcagcatgtcagtgtgcttcctggggagctggtagcaggggctccgggccctacttcagggctgctttctggcatatggctgatcccctcctcactcctcctccctgcattgctcctgcgcaagaagcaaaggtgaggggctgggtatggctcgtcctggcccctctaaggtggatctcggtggtttctagatgtgacagcacccttagtggatgagggagctcccggcaagcaggctgccgcgcagccccacacggagatcccagaaggaaccacaggtgagggtaagccccagagacccccaggcagtcaaggccctgctgggtgccccagctgacctgtgacagaagtgagggagctttgcgtgtttatcctcctgtggggcaggaacatgggtggattctggctcctgggaatcttgggttgtgagtagctcgatgccttggtgctcagttacctccctggctgcctgccagcctctcagagcatttagggccttctggacttctagatgctcctcatcttgcctcagtcagcgcgtcagttccagagacttctctgcagggttttctggggcaggtggtggcagacccgtgccttcttgacacctgaggtcagtccaccctcctgctcagactgcccagcacagggtcacctcccaaggggtggaccccaagatcacctgagcgcacagagggtgcagatgactggaccacaccttttggtgatcttaatgaggtggtcccagaggagctcagacatgcaatctagcatccagttctgggactctgtctccttttcaaacgtattcatgtagaacaggcatgacgagaatgccttgtcaacatgggtgatggggaatcaatcagacagggcgccgggctcaaggctgcagtcacccaagagtggctcagcccaccaggccctaggaaacgcctgcacagcctggagctcctggagtcatttccttcatgtcttcttcactgcacttacgtaaagatgccagccattggtttggtgatttggagggtgcccagttgcccaacaagaaatgcagaagaggcctagccaggatttcaccagcagtggagagtagagaagatgtggccagaaaagagtttcctttccctcctaaagatggtactccctgcagctactggggaagcctgcagcattctctagggctctgtgtgttgagagcagccccaccctggccccttctgagtgcatttctgctttgtgacttgatccgtgaagtcccctgagatgggcagaggggatgtcctcgaagctggggcagagcctcatccttgaacgtgaaggacgtttgaagactgtggcatgatcacaggatgagatcacagggaacttgagtttctctcctcctctcccttcacagttatttcactgagggaaatccctcccctgcccagaatgaaaactctagccaactcttgacttttccatcactccaaagtagttgaaagtacattagtctccacagtggcaaaacagtgtgcaaaagctaaataattagaacagccagtcccatgtgacagtcaaagcttctaactccattcaaagttgcagccattcccctcgagggctggcagggaggggaggggtaagagaaacaggaaggttcttactgagttggtcctggtgtgagctgcgtcacactccctgcagaggtttcaaggagactctctctctctctgtctccatggggaccttatttgaattcttctactcttaccccagcctgccatctccagctatcctcccctgaagagcccttctgctgcgctggattctggtggccatgtcatctcctcggccccgtgggagtctgaagatctggctgcagcctcacctctgaggtcctgctagttgccacctcttaaacatgatctgaggctcccatgcactctgacctgtgcccacatggggcccacgggaaacacgctggcaagcaaactgtgggtgtgcagacggttctcagggctgcagcacctgtcctttgctctgcccccaaagcaaggccagcccatcttccatcctctagtgttccttggtggggccctgaccacagtccaccaggtccctaaccagaggggacacacaccaggtgtcctcaatgtattgccttgaaacagttgtgctgggactgtgatggggggtggccatgtagccacccccaccacccccaagccactctctccaaggaaatcctcctaaagatccctttacatcctccatgtggtggggaggttctagagttgggtgcatgtgtcttcagctactgacaatgcagaccttagttggcacctcgctctggcctatcctgtttgctgttcttggcgctccagtgaaactccccatgggccatccagttggggtgcagtgtggccacccccttgcaggttcctgccttgctggagagcacagggccctcctggctcttgtaaaacactccccatggtacagagaggccagcagtgatgtgaggcccaacctccctccatggtgttcccaagcagctccctttctggggtcaaggggtggcaaagacagtgcagcgtccaatttctgactcaagccgggcctggctatcgcagctctgcactgtgtgtgacagcaaggcaactcacccagtgccgtggcagtgaccgtgtccgaggaagcctcctcacaccctctgtctcaaggactctggcatttagctggacttgctgtagctctgagcctttctgccattgccatcaccttgtcagaaactcaggccgaatctgcactcagagttgtgcccaggcagttgagccaacacttgctcagcgatattgtcacatgacaaggcactgtcaccactgggcatcgtgggtagcgcagtgtcggctggatggacccggagggtgtctgtgtcatgctagtgctagtgatgggagccccgtgagcccattgcccgccctcccatgccctcagcagctgcctggggacagccaatggcctgggtgtttctgaggctaccacatggcttccaggaaactcgagaacctttctctcccttgcctacactcttcacacaggcctgtgctggccagcggtggggatccggcattcctatcttaggtgcagagagtgactgactcattgcaggcctgggagataagactgatggcccagccagcaagatgtatggatttctcagaggcagtggcctctgtcattgtcctcaggaaatgctggtgattctggtggcctgaggtcaatgcatgtcaacgtggccaacttgccttataaactttttttctggacaattgcgtgcactgtcctgtaacagtgtcctgttgtttatgatgcagaaataggtgtttttaaagcctattgattttggtactattaatgtggtcaggaactttctcagtctttcttgtttggggtgagctgtggcttcctaaacaggaacccaagacacccccaaaagctgctcaccagcactgccagcctccctcttaccaagtagcacccgttcaggacattctgcgaaaggcatttgcccagaagttgggaggaaggaaatgtaacattttggggcacctaccatatgccaggcaccaggctaaacgtgttcacacaaattctcttactaaccctcaccatccttctacaagacaaactagtatcttcatcttggggttcaagatgaggaaatggaggctcagagaggttgaatgaatgccggtgcctggatatgaaccccatctgcctgactccgcaacccaggcaaagtctttccttgaacttcccagcagccactgcttagacacagcctccacaaccatggctcagcagcaaattgcttctctgacctcactcagcctgtgtgtccttgttgagtgaggcattcaggaccctggtcccaaagtggagaaagtctttcctactaggtcatagctacacctgcatgtgggtgctgtgccttttgtttagtgaacttttatcaccagcatcctcagcaatgacatttgcagagaagccagagctgaggcaccttggtattcttgggatgtgactttcctgaatgtttaagggaaaatgcccgaaggtacagagagcttggtttctagtaaacaataactgtcttgcttttaccccccttcatttgctgacacatacaccagctgaagaagcaggcattggagacacccccagcctggaagacgaagctgctggtcacgtgacccaaggtcagtgaactggaattgcctgccatgacttgggggttggggggagggacatggggtgggctctgccctgaaaagatcatttggacctgagctctaattcacaagtccaggagattttagggagttggttcttatcaaaggttggctactcagatatagaaagagccctagtggtttttttctaataccatttctgggtaattcctaaggcatttagtgttctgaaagatgctagccttgtccagcctgggagttgagaatgaatgtctaacagaaactctaggccgggcctggtggctcacgcctctaatcccagcactatgggagacccaggtgggcagatcacctgaggtcaggagtttgagaccagcctggccaacatgtgaaatcctgtctcactacaaataaaaaaattagccgggtgtggtggtaggtgcctataatcccagctactcaggaggctgaggcaggacaatcgctcgaacccaggaggtggacgttgcagtgagccgagatcgcatcattgcactccagcctgggcaacaaaagcaaaactccgtctcaaaaaaaaaaaagaaactcaaatatgtgtgacaggcgattctcactgcaggctgccctgtggctgatccaggagcaaggccttaaccatgtcatccccaagcgattgcttgtaaactttcttctgtgcagccttcaacccttattatgattttcttctcaggaaccaaactgctgtattcaagaaaggcagctttgtgtaatcatttatcataaatatcttaagaaaaatcctagagattcctaattttaggaaatgggagacctatggtactgatataatgtgggctgggcttgttttctgtcatttgctagataaatgaacttgagagcctactgtaaaatgtggaagcttctagattgcagaagggctggaaagacactgttcttttctcccgagtgatgggatctgtccagtatttagagctgcctctgaggccatctgattctaggagactctgcctcgttgaggatattttgaggcctaactacacattcctgcccccagagaggtcacagcctatagcaggctgatgtttctcatgtcacatggcacagaaaggcacattttcgttctcaggctaacaaagagcttcaaaaactattagaagggacagtggctataagagaagaacctcagtcaatgtgtgaaattaactaggaacctggctcctgtttcttttaggtcatgtttttcagcttaggtaaaactagaggctttgataaagcatgacctctagaaatcattgcttttcataaatggaagtgggtttgagttttttctactgattgttagtgcaggtgatgtctacatgcccccagaacatattccatgcaacaaaaaaagcccaggtcaccgtctttgctgggaacttgacttttgtgctcactgaattttaagctttctgacagcagcctggaatcatggagggataaagtacctattagtaagatggaaaaaggtgtttcaggttggagctgcagtctgttgagagtaagctatgggaaggcctgtatacgaggggtggacttttcttctgtaagtgtccagagaccaggcctcctgaagagggcatgggggcttaacttacctggactactgtgtttacaatactcatttatcttgaactcctcctaacccctgagaattgctacatttagtatttgctgagtacttcctagcatcctagggaatcaatagaacattctcccaaccaggctgggtgcggtggctcatgtctgtaatcccagcactttgggaggccaaggtaggcagatcccttgaggccaggagtgcaagactagcctggctgacatggtgaaaccccgtctttactaaaaatacaaaagttagccaggcatggtggtacacacctgtaatcccagctacatgggaggagtaggaggcaggagaattgcttgaacctgggaggtggaggttgctgtgagccgagatcatgccactgcactccagcctgggcgacagagtgagtgagactctgtttaaaaaaaaaaaaaaaaagaacattctcctaacctggcttcttcctccaggggtgtaattaatcatgtcagtttcctcattgatacacacacacacacactacaatcctgtatccattacttttcaaggtacatttactatttacgtttggggtccttgtctcttttttaatagtgtttcttaaagtcttgtattatatcagagtacagtaacatcccagtcaagagcactctagtaagctctaggaggaaagcgacttccggaaggcagtggagacctgtcctgttggggcagcataggggcagcccctgcctctggtcagttctggcgctcaggctcagggttgcctctgggctgttcttcccagagactgacaaagggctcccataaggcacctgcagagcctgtgagaagctgaagtcaatgttttcctgacaccagttgatctgtgcaggatccattgatttaaccacctgctgtgtggcatgcactgtggtcgatgccaggaacaggaattggaggggcccatgagcatggccagtatcacaggctggaggtgctgctgcgctctgaccgggcctcttggggatgagcccatgtcaaccaccttgcctccgatggggtcgggcccacaggttacctttgtgtgtccatgaccacaccttcctccccgacctcatccaaatctctttcttttccaagcccctgaatccttcagggctgcaggttttgtttaaagcagagctggtgagttgcataggttgttgcattgggactagatggggtgttcaaagagttgggagttaaaaaacataaagggtatttattaggagaaccaaggagtgtaattctcctgttcttaatatgcggccaggttaatgaatgtcacgtgaatgaaccagaaaaaaatgaagtgtgcccttgatcagctgggttggtgtgcagcaagctgtgtgaccaggggacagcagtggtcctgagggccgtcactgtctgccgtgcagagcccttcctcccacgggggcctacctcacctgtgccaagggcttgtctgtggtcagtgacctggatagatctgaatggggcttctttttcgaggagtcttatggcaggtctctcagtaaagactccattcttgatgatcacacattttggattttccaaatctgtcagagaatgggcttgaggcggggtttgtgggcactagtttcactggtttcatttaccaaaaaggggagcagaagtcaagtatggtggctcatccctgtaatcccagaggcaagagaattgcttgagcccaggagttcgagaccagcctgagcaacataaggagaccccgtctccacaaaaatgaaaaataacattttagtcagacgtggtggcatgcatctgtggtcccagctgcttgggagggtgagatgggagggttgtttgagccctggagttaaagttgcaatgagctgtgattgcaccactgcactctagcctgggtgacagaacgagaccctgtctcaaaaaaaaaaaaaaagaaagaaagaaaggaaaaaaaaaactcatgcctgtaatcccagcactttggggaccggggtgggcagatcacgaggtcaggagatcaagactatcctggccaacatggtgaaaccccgtttctactaaaaatacaaaaattagccaggtgtggtggcacgtgcctgtaatcccagttactcgggaggctgaggcaggagaatcgcttgaaccagggagtcagaggttgcagtgagctgagatcgtgccactgtactccagcctgggcgacagagtgagactctgtctcaaaccaaaaaaaaggggtggggggcgggggcaggagaacagtgagaggtagggagaggaaaggggattctcgctacacccaaaccagataccatctagaggctagaatctttgggaggctcaaattccctagaaagcaggagaagcttctgtagccctcccgctttcccagtagattaagcccagggcggctccagatgtgtgacatgctctgtgcccaaccagagcccatcataggcagaggaataacacccacaccagaagggccctcggaggtcaccacgtccaagaaccctctttacagatgaggaaactgaggcccagagaggggagagccacctagcgagctggtggcggctagaccaggagagctgtcattccaagcaagcaaaggcaacgagacgagcccagagctgtgctcccatctctttgttagggggcctgggatgccctctcagtgtcattttgtccaggatgatgctccctctcttaagcgattaatgcgcccttgctaaccttttgctatcgctgcctcttcaaaccagaggagttgagagttccgggccggcagaggaaggcgcctgaaaggcccctggccaatgagattagcgcccacgtccagcctggaccctgcggagaggcctctggggtctctgggccgtgcctcggggagaaagagccagaagctcccgtcccgctgaccgcgagccttcctcagcaccgtcccgtttgcccagcgcctcctccaacaggaggccctcaggagccctccctggagtggggacaaaaaggcggggactgggccgagaagggtccggcctttccgaagcccgccaccactgcgtatctccacacagagcctgaaagtggtaaggtggtccaggaaggcttcctccgagagccaggccccccaggtctgagccaccagctcatgtccggcatgcctggggctcccctcctgcctgagggccccagagaggccacacgccaaccttcggggacaggacctgaggacacagagggcggccgccacgcccctgagctgctcaagcaccagcttctaggagacctgcaccaggaggggccgccgctgaagggggcagggggcaaagagaggccggggagcaaggaggaggtggatgaagaccgcgacgtcgatgagtcctccccccaagactcccctccctccaaggcctccccagcccaagatgggcggcctccccagacagccgccagagaagccaccagcatcccaggcttcccagcggagggtgccatccccctccctgtggatttcctctccaaagtttccacagagatcccagcctcagagcccgacgggcccagtgtagggcgggccaaagggcaggatgcccccctggagttcacgtttcacgtggaaatcacacccaacgtgcagaaggagcaggcgcactcggaggagcatttgggaagggctgcatttccaggggcccctggagaggggccagaggcccggggcccctctttgggagaggacacaaaagaggctgaccttccagagccctctgaaaagcagcctgctgctgctccgcgggggaagcccgtcagccgggtccctcaactcaaaggtctgtgtcttgagcttcttcgctccttccctggggacctcccaggcctcccaggctgcgggcactgccactgagcttccaggcctcccgactcctgctgcttctgacgttcctaggacgccactaaatcgacacctgggtgcagctgctccactccctcggcctcctcccgtgctcaggctgtggccgcacgcgcccctcacgcttgcccgccactctgcatgtcaccagcacccccgctccgtgctacccaccttgtttgactctctggccacttgatttgtccacaacggcccatcagcccacaggaggtttggtgggtgccttccaccgacaggatgacgggtgccctcatggtgtctagaactctccaaccctcccatgtaggcataagcagccccactttgcagatgaggaaacggaggctcagagaagtacagtaacttgccgaaggccaatgagtagtaagtgacagagccaggtttgggatccaggtaggttgtctctgaaagacacgcctgtcctgcatcccacaacgcctcccaggaggtgctggagtgtggacgcctaacacagagatgtgcagggcacacacagcaggtgacacacacagcatccagaggtggcccagagctcatgctgtgcctttggcccagtgccctgcccccacccactctgccttgtggcaggaagacaaggagcagacacaagatctccctggtccacatgccaccacctccctctgcagaggacaaggggatcctcatgctggcattggagggggttgagcagggcccaccttgagccctcaggagcacgaccacagcagccctgcagggagggattggtgggaggagagtcccaagtatcagggagaggagagttggtgtcccacaggagacctcagagccacaaggcgagcttgttcataaatttgggacccttagcatttcacagttatttgcagagcccagaaatggatgttactgaagctcacagttgcaagcatctgttaaatttttattagattttacttttagggaaaactttgaaatgctataaagaagcctgtgtttaaaagttaagacagaggctgggggcgatggctcacgcctgtaatctcagcactttgggaggccaaggcaggtggatcatttgaggttaggagttcgagaccagcctggccaacatggtgagaccctgtctctactaaaattacaaaaaattagctgggcgtggtggcgggcacctgtagtcccagctactggggaggctgaagcaggataagtgcttgaacccaggaggcagaggttacagtgagccaagatcacaccactgtaccctaagcctgggcgacagagtgagactctgtctcaaaaaataaaataaaataaagttaagagagaaaaaaatatatcctatatcctttgttaaattccaaaacagtaggggacaaataactgacttgacaggttactacaatatttcctgaaatgatgttttcttgaatactggcctactagaggttcataggtgtgtttggattaaaaaagagttccatggcccagtgactgggggaaaaaaataaaagactaaagtaagttaaacaggcttttctgctgcaggacttgtcagagcctttaatgtactaatggccattgtgaccctctgagaaggtcacagagtgggtttcccaaacttacttgattctacctgctaacatttcctggaggaagtttgggaaatgccgatttagcagattcttttgttgtgccgtggatggtgctggttgatgtgggcaaaacaaagaacacgtgagtcagatccgcctggggctcttactaaagtgcaggttcccaggtgccactttaggcttacagacccagttgtggggtaagcctgggagtcttttagcaggtgattctgccacatagtatagttggaaaacctctgggcatactcattgctggtccctctagaaatccaggtgacaatagccaatgagaagctccaagagacccagttgtccatggggtagagggaatgtgatattgaaaccaaagaagaaaatctatgatcagttttcagcagtgactgtcaagagaaggagaagggtgagttagcgctgatgctggctgacaggtcagcgggttggtttcaccaaggagtgtgatgaaggctgatgttgtctgtgggaatgtatgatggtaactggtttgtagctaatttggggaagcagtgagaattcgtgccctttgaagaccagtaagtggcaagaaacccaccaggcctggctcagggctgggctgggcttggctcgtctcagagcagctggggctggtggccaaagccaccattagtgaggggcaggccctgggggtacaaccagcaactaggggacaaagacaaccctgccagcctctcctattctggaggcgtgtgaccagaaatggagatgggttggtcagcataagatggccaggaaggtggaaatcaggactgctggcaatctagccacatgggcaggggagccgggtggttccaggcagtttccaaggccaagagggtgagcaggcacctcacagggaatcagggccaagcctggctgcagtgtggagacaatgcacccacccccatccttggatcttgcaggaggctgggtcctcactgagctaccaacatccatggccctgaggcttttaaaacacccatccatggagtggggctggtcccagtggggtgaggctgaccctggcagaaacagggcaggagcctgtgggttagggagactgcaccttccttagatagcctccatgccatcatgtccccgtgacagtttctgctgcgtcccctctgcatggtcccaccctcggccagcctgctgccccctcttgccaggttgcgctaatcagtgaccccagtgtgctgtgttgatactaacaatgcgaggcctagcagattcaagggaaaagagaaccaactgggtttccaccagacccaactaaacaaacatggacctatcccagagaaatccagcttcaccacagctggctttctgtgaacagtgaaaatggagtgtgacaagcattcttattttatattttatcagctcgcatggtcagtaaaagcaaagacgggactggaagcgatgacaaaaaagccaaggtaagctgacgatgccacggagctctgcagctggtcaagtttacagagaagctgtgctttatgtctgattcattctcatatataatgtggggagtatttgtcactaaagtacagctgtcatttaaagtgctttgtattttggggcaggcttttaaaaagtccagcatttattagttttgatacttaccccagggaagagcagttggcaggttcatgaagtcatgctcctaattccagctttcttagtgtactttcagtgagaccctgacagtaaatgaaggtgtgtttgaaaaccaaacccaggacagtaaatgaaggtgtgtttgaaaaccagccctaggacagtaaatgaagccatcttctcactgcataaactgcacccagatcttcgcccatccttctcagtatttcacttcacccattgtttactgtctcaatgactggggaaatgtctggggaaatgctcccgtaattgcacagtggcgtttttcctggaaaatcccaccatggctctagataagacctatttttcttaaaggtatctaaaatttccagcataaattctgtctgaaacacctgaattttaatcagtactggagcccggagggcatctccagttgccacatagctctgagcattcagtggtgtgttgagggctgctcccggaagtgcctgcagagtcagggctccccagcctcatctagtgaggcagtggaagggcctgtggggatttggagagctggcctgggtctctgaagtgatagtgacagctgcttgtcaatcacggtgcacatttagtgctgggggcagggggcagggaataccagcctcatgcatgcatgcattcatttgttccttccttcattcattcattcagtacacatgggtacaacatccctgccctggagttgcccagagtctagggaggggaaagatctattaccctgggcctcggccagctggggagtgctgctggtggagaggggccgtgtgcagcgagggaaggaggagtcgtcaatacccccaccccagctttgctttcttgtcatcagccccagggccccagcctgtgtccctcctctcccattgctacttcatctcctgggtcctccttaccaagcctgaccacacagagggccttggccgcttccatggggaattggaaagcaataagatagcatcccctagaagcccagtgaagtctgggacaggacccttctctgagctctgacttgctcttggaaacacttcgaggcttagcctccccactttgtttcccgagagtgtgacctgttcccctccaaacacccccttctcctccagggccatgcccacccgtcaaaatcccccacgggcaggacgaactgtgggtgtcagtcaccatctatcctgcatcctggttccagggccccccccagccccgcctccatagggacaggcgtgcagacacccgtccctggctgcttcctcttgtggaatgggttcaaaagtaagcagtgttgtttacactgacaaactgaaaaaaaaagaaaaagagataacattggaggcttggcacagtggctcatgcctgtaatcccagcactttgggaggctaaggtgggaggatgtccccagcccaagagttctagaccagcctgggcaacatagcaagaccccatctcaaaaaaaaaatttaattggccaggcagaggtgggaggatcacttgaacccaaagggtggaggctgcagtgagccgtgatggcaccactgcactccagccagggcaacagagggagaccctgtctctaaaacaaacaaacaaacaaacaaacaaaagagttaacattggccagattaggattcaccagatagtgttaatattagtttgatttgagactttaatcagaaagcacatgtgtggtgggggtgggtgtaacctaagtcaggtagaatctttccaacttggggggggcacactcctgattgtagccatatgagtctgtcagtgtggtggaagaggccatgggttaatgggcaggtaaaaaagcaccttgcctggaattgagtagaaagtaaggcccttcagaccccgtgacacacttggggacattttcttgagtaacatcctaagattcatgtaccttgatgatctccatcaacttactcatgtgaagcacctttaaaccagtcgtctccaaattcaggggcacagtaacatccaacaggctggagaaagaacgtactagaacttccattcctttttcatgtcctcttctaaaagctttgtcagggccaggcgcggtggctcacgcctgtaatcccagcactttgggaggccgagacgggtggatcacgaggtcaggagatcgagaccatcctggctaacacagtgaaaccccatctctactaaaaatacaaaaaaacgagccgggcgtggtggtgggcgcctgtagtcccagctactcgggaggctgaggcaggagaatggcgtgaacccaggaggcagagcttgcagtgagccgagattgcaccactgcagtccagcctgggcgacagagcgagactccgtctcaaaaaagaaaaagaaaaagaaaaagaactgtgattggggaggacggtcactttcctgttcttactgatcagaagggatattaagggtacctgattcaaacagcctggagatcactgctttcaaccattacctgccttatttatttttagttactgtccttttttcagtttgtttccctcctccatgtgctgacttttattttgattttatttatgtttatgtttaagacatccacacgttcctctgctaaaaccttgaaaaataggccttgccttagccccaaacaccccactcctggtagctcagaccctctgatccaaccctccagccctgctgtgtgcccagagccaccttcctctcctaaatacgtctcttctgtcacttcccgaactggcagttctggagcaaaggagatgaaactcaaggtaaggaaaccacctttgaaaagaaccaggctgctctgctgtggtttgcaaatgtggggtttgtttatttgttttttagcctcaaagacctttcttcaaatgagttctggcatagaagcaccgtgtaaaatagttagaattctgggcaaaggggaaaagagagctgggggccatccctctcagcaccccacaggctctcatagcagcagctcctaagacacctggtgggaccttggtttcgaaatcgctactctaaggctgggcacggtggctcacacctgtaatcccagctctttaggaggccgaggagggtggatcacctgagatcaggagttcgagaccagcctggctaacatggcaaaaccctgtctctactaaaaatacaaaaattagccgggcgtggtggtatgcgtggtggtaatcgcagctactcgggaggctgaggcacaaggattgcttgaaccccagaggcagaggttgtagttagctccagcttgggcgacagagcaagaccctgtcgcaaaaattgtttaaaaaacaaacccaaaattgctactctcattgggttcctttgcccattcctgattttggcaagagaaatgcttccagattgccctgatctgggtaggacagcatcacgccatagcaacactgccccgtgagctcactgccccctcaactagcttgtggtccttggttaatgtcagtttcttttttgagtttgtgttatgtctaagggtcatctgctgggtaacggaacccagggactgccctagtccctagactgtgccatgcccgactctgccagctttgtcagtgatgctggtgctcgcctcctcgggtgctcgcctggtctgagcacacccaaggagttcttgaggccttagggttgtttgcgagagaatgaaagaacacgacctagctctctttagcatccttggtcaggttcaacactgcccccaggggcctctggtggagccaaccaccatcagccaaataaatccataattagagtcagaaaatggatgtctgcatatgtgtagtgcactaatgtcctgccgatgattgacatggagtggagagtgacctgatcattgctgtgagctctgctggccttggcacaactcatgctgataactaatgcacacagttcctctgggaggaaatgtcctcagggaacttggagtttgggtggggatgtgggtttgtgtgcccagcaagcccttgtggttgtagcagacactagtggcatctaggaggcaaagggtcaccccagtcttagccacgttttgagtcaaggtggcggagtggggctggtgttgactcttggtggcagtaacttttcccaatggtgaaaaacccctctatcatgtttcatttacagggggctgatggtaaaacgaagatcgccacaccgcggggagcagcccctccaggccagaagggccaggccaacgccaccaggattccagcaaaaaccccgcccgctccaaagacaccacccagctctggtaagaagaacgttctcttgaatcttagaggaagctgaagctctcagaggtacagccttcattttaggaggccttaggccactgagaatgaataacccctggcagctggtcagcagcttgcagtttactaagcactggagtcttcattgccttctcagtccttttgatttctgaggcaaatgttgaatccctacctttttttttttttttcttttgagacagagtttcgcttttgttatccaggccggagtgcagtggtgtgatctcagctcactgcatcctccacctcccaggttcaagcgattctcctacctcagcctccctagtagctgggattacaggcacctgccactatgcccggctaattttttgtatttttagtagagacagggtttcaccatgttggccaggctggtctcgaacgcctgacctcaggtgatccacctgcctcggcctcccaaagtgctgggattacaggcatgagccaccactcccagcctgaatcctcactttttatcaatgaagaaattgaggctgattctgcagcatgataaaaaaaaatacagaaaaaggaaaaaaaagaaagaaatcgagcctctgagagtttgcttgactgagtctaaccagctcattttaaacccgaggaaaatgcagtcacatgactactaagtggcagctctcggagcctctctggccccaagtccagggttccatagaggcagccccagcatggcatgttttcagtccccaaatgagactctggagacaaatgtctctggagacagagcagcagcctggataagtcacaatgggtgacgtcactcagggctcaacccctgggcagcttaacttgctagggacgttaggagtctgctgcaaaacctgagggtcttagctgagcagtcacaggctgggcccgttgccctgggctcctgtgagtaaaacccagtcaattttgagtacccagtaaggcatccattgagttattttgcagccaggagtgctattaagaacagtcgcggctgggcgtggtggctcatgcctgtaatcccagcactttgggaggccaaggtgggcggatcacctgaggtcaggagttcgagaccagcttggccaacatggcaaaaccccgtctctaataaaaatacaaaataattagctgggcgtggtggcgggcgcctgtaatcccagcttctcaggagggtgaggaaggagaatcacttgaacccaggaggcagaggttgcagtgagctgagatcgcaccattgcactccagcctggatgacaaaagtgagattccttctcaaaaaaaaaaaaaaaaaaacagtcgtcctctttggggattagggacagcctgcctgcctgcccgagcacttctctcttccattgccccagtgaagtattccaggcccctgggtttagactctgcaccatgtaggggtgtctgacctgcacttgctccttggtggcacgggcagcctatggcacttgctgcgggctgtgaccaaagcctggcctggatcttggatcttggtgactctgcttctccctggcctgagggagctgcccagagcctgcccaccacctgctgcgtgtctttgcggtggcatttctcgcacacatgccgtgcagtggcacccccaaggatggccattcactaaggcccattgtttttgtcttttcgcttcgtgttttctggcctggtgtttttctcatatacatgtgatccagggataattcccagaattttgacaggattttaagtagcgtttggatcctgctgtttttttttcacttaacatcgggccagttgactcacactctgttttttgttgttgtttttttgagacggagtctcactgtgtcacccaggctgaagtgcagtggcacaatcttggcatactgcaacctctgcttcccaaattcaagcagttttcctgcctcagcctcctgagtagctgggactacaggcacaggccaccacgccctgctaatttttgtatttttagtaaagacagggtttcaccattttggccagcctagtctcgaactcctgacctcaagtgatccgcccacctcggcctcccaaagtgctgggattacaggggactcacactttgtaacaacctgaaacaacgtgatgcatttccctttgggtcttacctgctcttcggtggctgcctgcaggtggagagaccctcccccttgggcccctcgaccttgtttcagaatggggcccctgctgggccagctgtgggtgcctgccacgtgaaggactcattaaggccctgtttaagcctgatgataataaggctttcgtggatttttctctttaagcgactaagcaagtccagagaagaccaccccctgcagggcccagatctgagagaggtactcgggagcctacttcgctgggagcagcctccctttgcgtgtgtggccattcactggcttgtgtttctagagccgggaggacccttttctgcaatgcagggttcacacagggttcgcagcctgaagatggagcagtccgaattctcttccctgtgcagtttgcgcagctgtgtttgtctgatgggctttctaatcctgtgtgctctccttgacttcagggacaatggcattacaggcatgagccaccatgcctggctgtctccctatgtttcagatgaagacataggcttaaggaggtcaggtgacttgcccacgaccactctgtaaataagaggcatgaaaagtatttggagccaccaccaccaagcccactggtcaccctgggtctctgaagtcagggaggcaggaggatgggaggtctgaggaggcagagaggctgagcctggaggccctggaggccgaggccccatctgttgtttccttatgtggaaaataagaggcttcgtttgtcctattgccacagagcgtactacttcaggaacatccaagacatggaaatccgcagggcacggtggctcacgtctataatcccggcactttgggaggttgaggtgggagaatcgcttgaggccagaagttcaagaccagcctgagcaacatagtcagaccccgtctctataaaaaacattatttttaaaaaagacatggaagtcaaattctaaaaactggtgctggctgggtgcggtggctcatgcctataatcccagcactttgggaggccgaggcgggtggatcacctgaggtcaggagttcaagaccagcctggccaacatggtaaaacctctactaaagaaatctttactgaaaatacaaaaatccagtctctactaaaataagtctctactaaaaatacaaaaattagccaggcgtggtgctgcacacctgtaatatcagctactcgggaggctgaggcaggagactcgcttgatcccatgcagcggaggttgcagtgagccgagatcacgccattgcactccagcctgggcatcagaataagactccgtctcaaaaaaaaaaccacaaaaaaacaaaacaacaacaaaagaaaactagtgcttattcgtcactggccaagctgcccattggctacatgggtgcttcaaagagctgcccttctccaggtctggccagcaggtatgtgttacagcaaatgcctggggcagcggcaggggcattgctgcgggaagcttctggacttgcaggaaagctaagttctcagactgcaggggagctaagcacacctcggcacagggtgaggcctgcggttctcagacttcagtctttgtggagcttgagaaaaatgaggctttgcaggtcccacccctagagattctgctctatccactcttgaaggggatcgagaaatttgcattttgcaactcccactttcctccttgaaagctccggagattctgacgcagggttccgtgggccacactttggaaaatacagacccatgagatagaataccagactgttgaagtgtaacgggggcctgggaagtgcagtaacagaagcaagtttgagggtaaaggacacccagaggagggagggacagcatctgcatggagaggagaagagaccccccagcagcttccagggtgttggaagggtgcgctagtaactgctatgcatggcaggtggggaactgtacgtcagggcacagcagcatgaagcggtatggctcgtgtggacagctagggacaggcaggcgtggagcaggcatcctgttctgaaggccaaatcccacagaggagccagggtgctggcaggagccctgaactagccgaacagctgaacagctgaacattcaccctgtggggaaagggtcagaagcgtccaggcttgagggcacagctgggtctcgtcactgcatcacccttatttaggataaaggccctgaagaattgtattagaggttggcaaagcatatctaccacctcctggagccacgctggccgcagggattataattatttccattttcaaattaaggcctctgagctcagagaggggaagttacttgtctgaggccacacagcttgttggagcccatctcttgacccaaagactgtggagccgagttggccacctctctgggagcgggtattggatggtggttgatggttttccattgctttcctgggaaaggggtgtctctgtccctaagcaaaaaggcagggaggaagagatgcttccccagggcagccgtctgctgtagctgcgcttccaacctggcttccacctgcctaacccagtggtgagcctgggaatggacccacgggacaggcagcccccagggccttttctgaccccacccactcgagtcctggcttcactcccttccttccttcccaggtgaacctccaaaatcaggggatcgcagcggctacagcagccccggctccccaggcactcccggcagccgctcccgcaccccgtcccttccaaccccacccacccgggagcccaagaaggtggcagtggtccgtactccacccaagtcgccgtcttccgccaagagccgcctgcagacagcccccgtgcccatgccagacctgaagaatgtcaagtccaagatcggctccactgagaacctgaagcaccagccgggaggcgggaaggtgagagtggctggctgcgcgtggaggtgtggggggctgcgcctggaggggtagggctgtgcctggaagggtagggctgcgcctggaggtgcgcggttgagcgtggagtcgtgggactgtgcatggaggtgtggggctccccgcacctgagcacccccgcataacaccccagtcccctctggaccctcttcaaggaagttcagttctttattgggctctccactacactgtgagtgccctcctcaggcgagagaacgttctggctcttctcttgccccttcagcccctgttaatcggacagagatggcagggctgtgtctccacggccggaggctctcatagtcagggcacccacagcggttccccacctgccttctgggcagaatacactgccacccataggtcagcatctccactcgtgggccatctgcttaggttgggttcctctggattctggggagattgggggttctgttttgatcagctgattcttctgggagcaagtgggtgctcgcgagctctccagcttcctaaaggtggagaagcacagacttcgggggcctggcctggatccctttccccattcctgtccctgtgcccctcgtctgggtgcgttagggctgacatacaaagcaccacagtgaaagaacagcagtatgcctcctcactagccaggtgtgggcgggtgggtttcttccaaggcctctctgtggccgtgggtagccacctctgtcctgcaccgctgcagtcttccctctgtgtgtgctcctggtagctctgcgcatgctcatcttcttataagaacaccatggcagctgggcgtagtggctcacgcctataatcccagcactttgggaggctgaggcaggcagatcacgaggtcaggagttcgagaccaacctgaccaacagggtgaaacctcgtctctactaaaaatacaaaaatacctgggcgtggtggtggtgcgcgcctataatcccagctactcaggaggctgaggcaggagaatcgcttgaacccaggaggcagaggttgcagtgagccgagatagtgccactgcactccagtttgagcaacagagcgagactctgtctcaaaacaaaataaaacaaaccaaaaaaacccaccatggcttagggcccagcctgatgacctcatttttcacttagtcacctctctaaaggccctgtctccaaatagagtcacattctaaggtacgggggtgttggggaggggggttagggcttcaacatgtgaatttgcggggaccacaattcagcccaggaccccgctcccgccacccagcactggggagctggggaagggtgaagaggaggctgggggtgagaaggaccacagctcactctgaggctgcagatgtgctgggccttctgggcactgggcctcggggagctagggggctttctggaaccctgggcctgcgtgtcagcttgcctcccccacgcaggcgctctccacaccattgaagttcttatcacttgggtctgagcctggggcatttggacggagggtggccaccagtgcacatgggcaccttgcctcaaaccctgccacctccccccacccaggatcccccctgcccccgaacaagcttgtgagtgcagtgtcacatcccatcgggatggaaatggacggtcgggttaaaagggacgcatgtgtagaccctgcctctgtgcatcaggcctcttttgagagtccctgcgtgccaggcggtgcacagaggtggagaagactcggctgtgccccagagcacctcctctcatcgaggaaaggacagacagtggctcccctgtggctgtggggacaagggcagagctccctggaacacaggagggagggaaggaagagaacatctcagaatctccctcctgatggcaaacgatccgggttaaattaaggtccggccttttcctgctcaggcatgtggagcttgtagtggaagaggctctctggaccctcatccaccacagtggcctggttagagaccttggggaaataactcacaggtgacccagggcctctgtcctgtaccgcagctgagggaaactgtcctgcgcttccactggggacaatgcgctccctcgtctccagactttccagtcctcattcggttctcgaaagtcgcctccagaagccccatcttgggaccaccgtgactttcattctccagggtgcctggccttggtgctgcccaagaccccagaggggccctcactggcctttcctgccttttctcccattgcccacccatgcacccccatcctgctccagcacccagactgccatccaggatctcctcaagtcacataacaagcagcacccacaaggtgctcccttccccctagcctgaatctgctgctccccgtctggggttccccgcccatgcacctctgggggcccctgggttctgccataccctgccctgtgtcccatggtggggaatgtccttctctccttatctcttcccttcccttaaatccaagttcagttgccatctcctccaggaagtcttcctggattcccctctctcttcttaaagcccctgtaaactctgaccacactgagcatgtgtctgctgctccctagtctgggccatgagtgagggtggaggccaagtctcatgcatttttgcagcccccacaagactgtgcaggtggccggccctcattgaatgcggggttaatttaactcagcctctgtgtgagtggatgattcaggttgccagagacagaaccctcagcttagcatgggaagtagcttccctgttgaccctgagttcatctgaggttggcttggaaggtgtgggcaccatttggcccagttcttacagctctgaagagagcagcaggaatggggctgagcagggaagacaactttccattgaaggcccctttcagggccagaactgtccctcccaccctgcagctgccctgcctctgcccatgaggggtgagagtcaggcgacctcatgccaagtgtagaaaggggcagatgggagccccaggttatgacgtcaccatgctgggtggaggcagcacgtccaaatctactaaagggttaaaggagaaagggtgacttgacttttcttgagatattttgggggacgaagtgtggaaaagtggcagaggacacagtcacagcctcccttaaatgccaggaaagcctagaaaaattgtctgaaactaaacctcagccataacaaagaccaacacatgaatctccaggaaaaaagaaaaagaaaaatgtcatacagggtccatgcacaagagcctttaaaatgacccgctgaagggtgtcaggcctcctcctcctggactggcctgaaggctccacgagcttttgctgagacctttgggtccctgtggcctcatgtagtacccagtatgcagtaagtgctcaataaatgtttggctacaaaagaggcaaagctggcggagtctgaagaatccctcaaccgtgccggaacagatgctaacaccaaagggaaaagagcaggagccaagtcacgtttgggaacctgcagaggctgaaaactgccgcagattgctgcaaatcattgggggaaaaacggaaaacgtctgttttcccctttgtgcttttctctgttttcttctttgtgcttttctctgttttcaggatttgctacagtgaacatagattgctttggggccccaaatggaattattttgaaaggaaaatgcagataatcaggtggccgcactggagcaccagctgggtaggggtagagattgcaggcaaggaggaggagctgggtggggtgccaggcaggaagagcccgtaggccccgccgatcttgtgggagtcgtgggtggcagtgttccctccagactgtaaaagggagcacctggcgggaagagggaattcttttaaacatcattccagtgcccgagcctcctggacctgttgtcatcttgaggtgggcctcccctgggtgactctagtgtgcagcctggctgagactcagtggccctgggttcttactgctgacacctaccctcaacctcaaccactgcggcctcctgtgcaccctgatccagtggctcattttccactttcagtcccagctctatccctatttgcagtttccaagtgcctggtcctcagtcagctcagacccagccaggccagcccctggttcccacatcccctttgccaagctcatccccgccctgtttggcctgcgggagtgggagtgtgtccagacacagagacaaaggaccagcttttaaaacattttgttggggccaggtgtggtggctcacacctaatcccaacacctggggaggccaaggcagaaggatcacttgagtccaggagttcaagaccagcctgggcaacatagggagaccctgtctctacaattttttttttaattagctgggcctgttggcactctcctgtagttccagctactctagaggctgaggtgggaggactgcttgagcctgggaggtcagggctgcaatgagccatgttcacaccactgaacgccagcctgggcgagaccctgtatcaaaaaagtaaagtaaaatgaatcctgtacgttatattaaggtgccccaaattgtacttagaaggatttcatagttttaaatacttttgttatttaaaaaattaaatgactgcagcatataaattaggttcttaatggaggggaaaaagagtacaagaaaagaaataagaatctagaaacaaagataagagcagaaataaaccagaaaacacaaccttgcactcctaacttaaaaaaaaaaatgaagaaaacacaaccagtaaaacaacatataacagcattaagagctggctcctggctgggcgcggtggcgcatgcctgtaatcccaacactttgggaggccgatgctggaggatcacttgagaccaggagttcaaggttgcagtgagctatgatcataccactacaccctagcctgggcaacacagtgagactgagactctattaaaaaaaaaatgctggttccttccttatttcattcctttattcattcattcagacaacatttatggggcacttctgagcaccaggctctgtgctaagagcttttgcccccagggtccaggccaggggacaggggcaggtgagcagagaaacagggccagtcacagcagcaggaggaatgtaggatggagagcttggccaggcaaggacatgcagggggagcagcctgcacaagtcagcaagccagagaagacaggcagacccttgtttgggacctgttcagtggcctttgaaaggacagcccccacccggagtgctgggtgcaggagctgaaggaggatagtggaacactgcaacgtggagctcttcagagcaaaagcaaaataaacaactggaggcagctggggcagcagagggtgtgtgttcagcactaaggggtgtgaagcttgagcgctaggagagttcacactggcagaagagaggttggggcagctgcaagcctctggacatcgcccgacaggacagagggtggtggacggtggccctgaagagaggctcagttcagctggcagtggccgtgggagtgctgaagcaggcaggctgtcggcatctgctggggacggttaagcaggggtgagggcccagcctcagcagcccttcttggggggtcgctgggaaacatagaggagaactgaagaagcagggagtcccagggtccatgcagggcgagagagaagttgctcatgtggggcccaggctgcaggatcaggagaactggggaccctgtgactgccagcggggagaagggggtgtgcaggatcatgcccagggaagggcccaggggcccaagcatgggggggcctggttggctctgagaagatggagctaaagtcactttctcggaggatgtccaggccaatagttgggatgtgaagacgtgaagcagcacagagcctggaagcccaggatggacagaaacctacctgagcagtggggctttgaaagccttggggcggggggtgcaatattcaagatggccacaagatggcaatagaatgctgtaactttcttggttctgggccgcagcctgggtggctgcttccttccctgtgtgtattgatttgtttctcttttttgagacagagtcttgctgggttgcccaggctggagtgcagtggtgcgatcatagctcactgcagccttgaagtcctgagctcaagagatccttccacctcagcctcctgagtagttgggaccacaggcttgcaccacagtgcccaactaatttcttatattttttgtagagatggggtttcactgtgtcgcccaggatggtcttgaactcctgggctcaagtgatcctcctgcctcagcctcgcaaattgctgggattacaggtgtgagccaccatgcccgaccttctctttttaagggcgtgtgtgtgtgtgtgtgtgtgtgggcgcactctcgtcttcaccttcccccagccttgctctgtctctacccagtcacctctgcccatctctccgatctgtttctctctccttttacccctctttcctccctcctcatacaccactgaccattatagagaactgagtattctaaaaatacattttatttatttattttgagacagagtctcactctgtcacccaggctggagtgcagtggtgcaatctcggctcactgcaacctccgcctcccaggttgaagcaactctcctgcctcagcctccctagtagctgggattacaagcacacaccaccatgcctagcaaatttttatatttttagtagaggaggggtgtcaccatgtttgccaagctggtctcaaactcctggcctcaggtgatctgcctaccttggtctcccaaagtgctgggattacaggtgtgagccaccacgcctgcccttaaaaatacattatatttaatagcaaagccccagttgtcactttaaaaagcatctatgtagaacatttatgtggaataaatacagtgaatttgtacgtggaatcgtttgcctctcctcaatcagggccagggatgcaggtgagcttgggctgagatgtcagaccccacagtaagtggggggcagagccaggctgggaccctcctctaggacagctctgtaactctgagaccctccaggcatcttttcctgtacctcagtgcttctgaaaaatctgtgtgaatcaaatcattttaaaggagcttgggttcatcactgtttaaaggacagtgtaaataattctgaaggtgactctaccctgttatttgatctcttctttggccagctgacttaacaggacatagacaggttttcctgtgtcagttcctaagctgatcaccttggacttgaagaggaggcttgtgtgggcatccagtgcccaccccgggttaaactcccagcagagtattgcactgggcttgctgagcctggtgaggcaaagcacagcacagcgagcaccaggcagtgctggagacaggccaagtctgggccagcctgggagccaactgtgaggcacggacggggctgtggggctgtggggctgcaggcttggggccagggagggagggctgggctctttggaacagccttgagagaactgaacccaaacaaaaccagatcaaggtctagtgagagcttagggctgctttgggtgctccaggaaattgattaaaccaagtggacacacacccccagccccacctcaccacagcctctccttcagggtcaaactctgaccacagacatttctcccctgactaggagttccctggatcaaaattgggagcttgcaacacatcgttctctcccttgatggtttttgtcagtgtctatccagagctgaagtgtaatatatatgttactgtagctgagaaattaaatttcaggattctgatttcataatgacaaccattcctcttttctctcccttctgtaaatctaagattctataaacggtgttgacttaatgtgacaattggcagtagttcaggtctgctttgtaaatacccttgtgtctattgtaaaatctcacaaaggcttgttgccttttttgtggggttagaacaagaaaaagccacatggaaaaaaaatttcttttttgtttttttgtttgcttgtttttttgagacagagtttcactctgtcgcccaggctggagtgcagtggtgcgatctccgcccactgcaagctccacctcccgggttcatgctattctcctgtctcagcctcccaagtagctgggactgcaggtgcccgccaccacacctggctaatttttttgtatttttagtagagacggggtttcaccgtgttagccaggatggtctcaatctcctgacctcgtcatctgcctgcctcggcctcccaaagtgctgagattacaggcgtgagccaccgtgcccggccagaaaaaaacatttctaagtatgtggcagatactgaattattgcttaatgtcctttgattcatttgtttaatttctttaatggattagtacagaaaacaaagttctcttccttgaaaaactggtaagttttctttgtcagataaggagagttaaataacccatgacatttccctttttgcctcggcttccaggaagctcaaagttaaatgtaatgatcactcttgtaattatcagtgttgatgcccttcccttcttctaatgttactctttacattttcctgctttattattgtgtgtgttttctaattctaagctgttcccactcctttctgaaagcaggcaaatcttctaagccttatccactgaaaagttatgaataaaaaatgatcgtcaagcctacaggtgctgaggctactccagaggctgaggccagaggaccacttgagcccaggaatttgagacctgggctgggcagcatagcaagactctatctccattaaaactatttttttttatttaaaaaataatccgcaaagaaggagtttatgtgggattccttaaaatcggagggtggcatgaattgattcaaagacttgtgcagagggcgacagtgactccttgagaagcagtgtgagaaagcctgtcccacctccttccgcagctccagcctgggctgaggcactgtcacagtgtctccttgctggcaggagagaatttcaacattcaccaaaaagtagtattgtttttattaggtttatgaggctgtagccttgaggacagcccaggacaactttgttgtcacatagatagcctgtggctacaaactctgagatctagattcttctgtggctgcttctgacctgagaaagttgcggaacctcagcgagcctcacatggcctccttgtccttaacgtggggacggtgggcaagaaaggtgatgtggcactagagatttatccatctctaaaggaggagtggattgtacattgaaacaccagagaaggaattacaaaggaagaatttgagtatctaaaaatgtaggtcaggcgctcctgtgttgattgcagggctattcacaatagccaagatttggaagcaacccaagtgtccatcaacagacaaatggataaagaaaatgtggtgcatatacacaatggaatactattcagccatgaaaaagaatgagaatctgtcatttgaaacaacatggatggaactggaggacattatgttaagtgaaataagccagacagaaggacagacttcacatgttctcacacatttgtgggagctaaaaattaaactcatggagatagagagtagaaggatggttaccagaggctgaggagggtggaggggagcagggagaaagtagggatggttaatgggtacaaaaacgtagttagcatgcatagatctagtattggatagcacagcagggtgacgacagccaacagtaatttatagtacatttaaaaacaactaaaagagtgtaattggactggctaacatggtgaaaccccgtctctactaaaaatacaaaaattagctgggcatggtggctcacgcctgtaatcccagcactttgggaggccgaggcgggccgatcacgaggtcaggagatcgagaccatcctagctaacatggtgaaaccccgtctctactacaaatacaaaaaaaagaaaaaattagccgggcatggtggtgggcgcctgtagtcccagctactcgggaggctgaggcaggagaatggcgtgaacccgggaggcggagcttgcagtgagccgagatcgcgccactgcactccagcctgggcgacaaggcaagattctatctcaaaaaaataaaaataaaataaaataaaataataaaataaaataaaataaaataaaataaataaaataaaataaaatgtataattggaatgtttataacacaagaaatgataaatgcttgaggtgatagataccccattcaccgtgatgtgattattgcacaatgtatgtctgtatctaaatatctcatgtaccccacaagtatatacacctactatgtacccatataaatttaaaattaaaaaattataaaacaaaaataaataagtaaattaaaatgtaggctggacaccgtggttcacgcctgtaatcccagtgctttgtgaggctgaggtgagagaatcacttgagcccaggagtttgagaccggcctgggtgacatagcgagaccccatcatcacaaagaatttttaaaaattagctgggcgtggtagcacataccggtagttccagctacttgggagaccgaggcaggaggattgcttgagcccaggagtttaaggctgcagtgagctacgatggcgccactgcattccagcctgggtgacagagtgagagcttgtctctattttaaaaataataaaaagaataaataaaaataaattaaaatgtaaatatgtgcatgttagaaaaaatacacccatcagcaaaaagggggtaaaggagcgatttcagtcataattggagagatgcagaataagccagcaatgcagtttcttttattttggtcaaaaaaaataagcaaaacaatgttgtaaacacccagtgctggcagcaatgtggtgaggctggctctctcaccagggctcacagggaaaactcatgcaacccttttagaaagccatgtggagagttgtaccgagaggttttagaatatttataactttgacccagaaattctattctaggactctgtgttatgaaaataacccatcatatggaaaaagctcctttcagaaagaggttcatgggaggctgtttgtattttttttttctttgcatcaaatccagctcctgcaggactgtttgtattattgaagtacaaagtggaatcaatacaaatgttggatagcaggggaacaatattcacaaaatggaatgggacatagtattaaacatagtgcttctgatgaccgtagaccatagacaatgcttaggatatgatatcacttcttttgttgttttttgtattttgagacgaagtctcattctgtcacccaggctggagttcagtggcgccatctcagctcactgcaacctccatctcccgggttcaagctattctccttcctcaacctcccgagtagctgggttgcgcaccaccatgcctggctaacttttgtatttttagtacagacggggtttcaccacgttggccaggctgctcttgaactcctgacgtcaggtgatccaccagccttgacctcccaaagtgctaggattacaggagccactgtacccagcctaggatatgatatcacttcttagagcaagatacaaaattgcatgtgcacaataattctaccaagtataggtatacaggggtagttatatataaatgagacttcaaggaaatacaacaaaatgcaatcgtgattgtgttagggtggtaagaaaacggtttttgctttgatgagctctgttttttaaaatcgttatattttctaataaaaatacatagtcttttgaaggaacataaaagattatgaagaaatgagttagatattgattcctattgaagattcagacaagtaaaattaaggggaaaaaaaacgggatgaaccagaagtcaggctggagttccaaccccagatccgacagcccaggctgatggggcctccagggcagtggtttccacccagcattctcaaaagagccactgaggtctcagtgccattttcaagatttcggaagcggcctgggcacggctggtccttcactgggatcaccacttggcaattatttacacctgagacgaataaaaaccagagtgctgagattacaggcatggtggcttacgcttgtaatcggctttgggaagccgaggtgggctgattgcttgagcccaggagtttcaaactatcctggacaacatagcatgacctcgtctctacaaaaaatacaaaaaatttgccaggtgtggtggcatgtgcctgtggtcccagctacttgggaggctgaagtaggagaatcccctgagccctgggaagtcgaggctgcactgagccgtgatggtgtcactgcactccagcctgggtgacaaagtgagaccctatctcacaaagaaaaaaaacaaaacaaaaaacccaaagcacactgtttccactgtttccagagttcctgagaggaaaggtcaccgggtgaggaagacgttctcactgatctggcagagaaaatgtccagtttttccaactccctaaaccatggttttctatttcatagttcttaggcaaattggtaaaaatcatttctcatcaaaacgctgatattttcacacctccctggtgtctgcagaaagaaccttccagaaatgcagtcgtgggagacccatccaggccacccctgcttatggaagagctgagaaaaagccccacgggagcatttgctcagcttccgttacgcacctagtggcattgtgggtgggagagggctggtgggtggatggaaggagaaggcacagcccccccttgcagggacagagccctcgtacagaagggacaccccacatttgtcttccccacaaagcggcctgtgtcctgcctacggggtcagggcttctcaaacctggctgtgtgtcagaatcaccaggggaacttttcaaaactagagagactgaagccagactcctagattctaattctaggtcagggctaggggctgagattgtaaaaatccacaggtgattctgatgcccggcaggcttgagaacagccgcagggagttctctgggaatgtgccggtgggtctagccaggtgtgagtggagatgccggggaacttcctattactcactcgtcagtgtggccgaacacatttttcacttgacctcaggctggtgaacgctcccctctggggttcaggcctcacgatgccatccttttgtgaagtgaggacctgcaatcccagcttcgtaaagcccgctggaaatcactcacacttctgggatgccttcagagcagccctctatcccttcagctcccctgggatgtgactcaacctcccgtcactccccagactgcctctgccaagtccgaaagtggaggcatccttgcgagcaagtaggcgggtccagggtggcgcatgtcactcatcgaaagtggaggcgtccttgcgagcaagcaggcgggtccagggtggcgtgtcactcatccttttttctggctaccaaaggtgcagataattaataagaagctggatcttagcaacgtccagtccaagtgtggctcaaaggataatatcaaacacgtcccgggaggcggcagtgtgagtaccttcacacgtcccatgcgccgtgctgtggcttgaattattaggaagtggtgtgagtgcgtacacttgcgagacactgcatagaataaatccttcttgggctctcaggatctggctgcgacctctgggtgaatgtagcccggctccccacattcccccacacggtccactgttcccagaagccccttcctcatattctaggagggggtgtcccagcatttctgggtcccccagcctgcgcaggctgtgtggacagaatagggcagatgacggaccctctctccggaccctgcctgggaagctgagaatacccatcaaagtctccttccactcatgcccagccctgtccccaggagccccatagcccattggaagttgggctgaaggtggtggcacctgagactgggctgccgcctcctcccccgacacctgggcaggttgacgttgagtggctccactgtggacaggtgacccgtttgttctgatgagcggacaccaaggtcttactgtcctgctcagctgctgctcctacacgttcaaggcaggagccgattcctaagcctccagcttatgcttagcctgcgccaccctctggcagagactccagatgcaaagagccaaaccaaagtgcgacaggtccctctgcccagcgttgaggtgtggcagagaaatgctgcttttggcccttttagatttggctgcctcttgccaggagtggtggctcgtgcctgtaattccagcactttgggagactaaggcgggaggttcgcttgagcccaggagttcaagaccagcctgggcaacaatgagacccctgtgtctacaaaaagaattaaaattagccaggtgtggtggcacgcacctgtagtcccagctacttgggaggctgaggtgggaggattgcctgagtccgggaggcggaagttgcaaggagccatgatcgcgccactgcacttcaacctaggcaacagagtgagactttgtctcaaaaaacaatcatataataattttaaaataaatagatttggcttcctctaaatgtccccggggactccgtgcatcttctgtggagtgtctccgtgagattcgggactcagatcctcaagtgcaactgacccacccgataagctgaggcttcatcatcccctggccggtctatgtcgactgggcacccgaggctcctctcccaccagctctcttggtcagctgaaagcaaactgttaacaccctggggagctggacgtatgagacccttggggtgggaggcgttgatttttgagagcaatcacctggccctggctggcagtaccgggacactgctgtggctccggggtgggctgtctccagaaaatgcctggcctgaggcagccacccgcatccagcccagagggtttattcttgcaatgtgctgctgcttcctgccctgagcacctggatcccggcttctgccctgaggccccttgagtcccacaggtagcaagcgcttgccctgcggctgctgcatggggctaactaacgcttcctcaccagtgtctgctaagtgtctcctctgtctcccacgccctgctctcctgtccccccagtttgtctgctgtgaggggacagaagaggtgtgtgccgcccccacccctgcccgggcccttgttcctgggattgctgttttcagctgtttgagctttgatcctggttctctggcttcctcaaagtgagctcggccagaggaggaaggccatgtgctttctggttgaagtcaagtctggtgccctggtggaggctgtgctgctgaggcggagctggggagagagtgcacacgggctgcgtggccaacccctctgggtagctgatgcccaaagacgctgcagtgcccaggacatctgggacctccctggggcccgcccgtgtgtcccgcgctgtgttcatctgcgggctagcctgtgacccgcgctgtgctcgtctgcgggctagcctgtgtcccgcgctctgcttgtctgcggtctagcctgtgacctggcagagagccaccagatgtcccgggctgagcactgccctctgagcaccttcacaggaagcccttctcctggtgagaagagatgccagcccctggcatctgggggcactggatccctggcctgagccctagcctctccccagcctgggggccccttcccagcaggctggccctgctccttctctacctgggacccttctgcctcctggctggaccctggaagctctgcagggcctgctgtccccctccctgccctccaggtatcctgaccaccggccctggctcccactgccatccactcctctcctttctggccgttccctggtccctgtcccagcccccctccccctctcacgagttacctcacccaggccagagggaagagggaaggaggccctggtcataccagcacgtcctcccacctccctcggccctggtccaccccctcagtgctggcctcagagcacagctctctccaagccaggccgcgcgccatccatcctccctgtcccccaacgtccttgccacagatcatgtccgccctgacacacatgggtctcagccatctctgccccagttaactccccatccataaagagcacatgccagctgacaccaaaataattcgggatggttccagtttagacctaagtggaaggagaaaccaccacctgccctgcaccttgttttttggtgaccttgataaaccatcttcagccatgaagccagctgtctcccaggaagctccagggcggtgcttcctcgggagctgactgataggtgggaggtggctgcccccttgcaccctcaggtgaccccacacaaggccactgctggaggccctggggactccaggaatgtcaatcagtgacctgccccccaggccccacacagccatggctgcatagaggcctgcctccaagggacctgtctgtctgccactgtggagtccctacagcgtgccccccacaggggagctggttctttgactgagatcagctggcagctcagggtcatcattcccagagggagcggtgccctggaggccacaggcctcctcatgtgtgtctgcgtccgctcgagcttactgagacactaaatctgttggtttctgctgtgccacctacccaccctgttggtgttgctttgttcctattgctaaagacaggaatgtccaggacactgagtgtgcaggtgcctgctggttctcacgtccgagctgctgaactccgctgggtcctgcttactgatggtctttgctctagtgctttccagggtccgtggaagcttttcctggaataaagcccacgcatcgaccctcacagcgcctcccctctttgaggcccagcagataccccactcctgcctttccagcaagatttttcagatgctgtgcatactcatcatattgatcacttttttcttcatgcctgattgtgatctgtcaatttcatgtcaggaaagggagtgacatttttacacttaagcgtttgctgagcaaatgtctgggtcttgcacaatgacaatgggtccctgtttttcccagaggctcttttgttctgcagggattgaagacactccagtcccacagtccccagctcccctggggcagggttggcagaatttcgacaacacatttttccaccctgactaggatgtgctcctcatggcagctgggaaccactgtccaataagggcctgggcttacacagctgcttctcattgagttacacccttaataaaataatcccattttatcctttttgtctctctgtcttcctctctctctgcctttcctcttctctctcctcctctctcatctccaggtgcaaatagtctacaaaccagttgacctgagcaaggtgacctccaagtgtggctcattaggcaacatccatcataaaccaggtagccctgtggaaggtgagggttgggacgggagggtgcagggggtggaggagtcctggtgaggctggaactgctccagacttcagaaggggctggaaaggatattttaggtagacctacatcaaggaaagtgttgagtgtgaaacttgcgggagcccaggaggcgtggtggctccagctcgctcctgcccaggccatgctgcccaagacaaggtgaggcgggagtgaagtgaaataaggcaggcacagaaagaaagcacatattctcggccgggcgctgtggctcacgcctgtaattccagcactttgggaggccaaggtgggtggatcatgaggtcaggagattgagaccatcctggctaacacagtgaaaccccgtctctactaaaaatacaaaaaattagccgggcgtggtggtgggcgcctgtagtcccagctactccggaggctgaggcaggaaaatggcgtgaacccggaaggcggagcttgcagtgagcggagtgagcagagatcgcgccactgcactccagcctgggcgacagagcgagactccgtctcaaaaaaaaaaagcacatgttctcgcttctttgtgggatccaggagatagagaatagaaggatggttaccagaggctgggaagggtagtgaggggatggtggggggatggtcaatgggtacaaaaaaaatagaataagacctagtatttgatagtgcaacagggtgactatagtcaataataatttaattgtacatttaaaaataactaaaagatagccgggtgcagtggcttacgtctgtaatcccagtactttgggaggctgaggtgggcgtttgagaccagcctggccaacatggtgaaaccccatctctactaaaaatacaaaaattagccaggcatggtggcgggcgcctgtaatcccagctactcgggaggctgaggcaggagaatcacttgaacctgggaggcagaggttgcagtgagccgagatcttgccactgcactccagcctgggtgacagtgaaactccgtctcaaaaataaaaataaaaatacagctgggcacggtggctcacgcctgtaatcccagcactttgggaggccgaggcgagcggatcacaaggtcaggagatatagaccatcctggctaacacggtgaaacccggtctctactaaaaatacaaaaaattagccaggcgtggtggcaggtgcctatagtcccagctactcacaaggctgaggcaggagaatggcatgaacctgggaggcggagcttgcagtgagccgagattgtgccactgcactccagcctgggcgagagagtgagactccgtctcaaaacaaaaacaaaaacaaaaacaaaaacaaacacacaacaaaaacctaaaagaatataaatggattgtttgtaacacaaaggacaaatgtttgaggggatggataccccattttccatgatgtgattattatacattgtgtgtctgtatcaaaacatctcatgagccccataaatatatacacctaactatgtacccacaaaaattaaaaaaatatattttttaaggtgaagagggaggcgagatgctggccttaacccctaacccgttgttctccctgcaagctgtccacagggcctctcagactcgaggttcagctatatggatgcatgagcttggtccccagccaacatgggagacacttcaccatcggcagcagctacagcacaggaaccctgggtcactgccatgtcccctctgtgactttgtttaaacagaaaatgatgctctgggccggctgtggtggcccacacctataatcccagcaccttgggaggcgggggtgggcagattgcctgaggtcaggagttggagatcagcctggccgacatggcgaaaccccatgtctactaaaaatacaaaaactagccaggcatggtggcacatgcctgtaatcccagctacttgggaggctgaagcaggagaatcacttgaacccaggaggcagaggctgagtgagccaagatcgtgccaatgcactccagcttgggtgagggagtgagactccgtctcaaaaaaaaaaaaaaagaaagaaaaagaaaagaaagtgatcctactggaaccatgcttactcccctccccacctcacactgtgtagaaattagtgctgtcggccaggcgcggtggctcatgcctgtaatcgcagcactttgggaggccaaggcaggcggatcacgaggtcaggagatcaagaccatcctggctaacacagtgaaaccctgtctctactaaaaatacaaaaaattagccgggcatggtggcaggcacctgtagtcccaactacttgggaggctgaggcaggagaatggcatgaacctgggaggcggagcttgcagtgagccaagatcgcgccactgcataccagcctaggtgacagagtgagactcagcaaaaaaagaaagaaagaaagaaagaaatcagtgctgtctatacttctttctgcagtgatggaaatattctgtatctgtgctgtccagtatagtagccactagctacatgtggcacttgaaacatggctggtacagttgaggaagagtggctgccatatcggacgacacagctatagattctgtcaccccaccccgagagtccagagcggggacttctgccttaggccctattcagggctgatttttacttgaacccttactgtgggaagagaaggccatgagaagttcagtctagaatgtgactccttattttctggctcccttggacactttgtgggatttagtctccctgtggaaagtattccacaagtggtgccaccaccccagctgtgagagcagctgggagctgcttttgtcatctttccctggaaagtcctgtgggctgtctcttcctcatgccttgtcccatgcttgggcatggtgtcaagcgtcaggagggagaaagggtccttatttatttatttagagagggacccttcttctgttcccaggctggagtgcagtggtgcgatctcggctcactgcaacctccgcctcctgggttcaagtgattctcctgcctcagcctcctgagtagctgagattacaggcacatgccaacatgcctggctaattttttttttttttttttttttttttttttgagatggagttgtactctcattgcccaggctggaatgtaatggcacaatctcggctcactgcaacctccacctcctggattcaagcaattctcctgtctcagcttcccaagtagctgggattacaggtgcccgccaccatgctcaactaatttttgtattttttttttagtagagacgaggtttcaccatgttggtcagactggtctcaaactcctgacctcaggtgatccacctgcctcggcctcccaaagtgctaggattacaggcatgagccaccacgcccggcctgaaagggttcttatttagtgtgcattttgacattcaatttaattccaaggtcttgtggggtcatggtttacaggatgttgatatagaaaagacttcacttaatgggccgggcgcagtggctcatgcctgtaatcccagcactttgggaggccgaggcaggcagatcaggaggtcaggagattgagaccatcctggctaacacagtgaaaccccatctctactgaaaatacaaaaaattagctgggcgtggtggcaggcacctgtagtcccagccactcggttggctgaggcaggagaatggcatgaacccgggaggcggagcttgcagtgagcagagaccatgccactgcactccagcctgggcgacagagcaagactctgtctcaagaaaaaaaaaaaaaaaacagactttacttactggaagccaaccaatgtatatttagagtaatttttcctgggctgagctgtcatttacttttgcagtatctcaagaagaagagtttacagtgtaaatatttgatgcacactttgattatatagatgaagcaaactattttcaagagctttgcaaggacttacttgtatccaaacaccattctaaaggagtcttacctacttctaaaggctggtctctacttggaaccacttgcttggccctggttcaagtcctgctgcaaacctggaagtcctgtcattgtcttcttccctccagagcagtggcacccaatctaatttttgctgtgccccagcagcccctggcactttgccctgtagactgcagacctcatgtaatgtatgttaagtccacagaaccacagaagatgatggcaagatgctcttgtgtgtgttgtgttctaggaggtggccaggtggaagtaaaatctgagaagcttgacttcaaggacagagtccagtcgaagattgggtccctggacaatatcacccacgtccctggcggaggaaataaaaaggtaaagggggtagggtgggttggatgctgcccttgggtatatgggcattaatcaagttgagtggacaaaggctggtccagttcccagaggaggaaaacagaggcttctgtgttgactggctggatgtgggccctcagcagcatccagtgggtctccactgcctgtctcaatcacctggagctttagcacgtttcacacctgggccccaacctggagaggctgaccaatgggtctcaggggcagctcggttgctggagtttttgtttttatttatttttatgtatttaaggcagggtctctgtattagtccattctcacactgctaataaagacatacccaagactgggtaatttataaaggaaagaggtttaatggactcacagttccacatggctggggaggcctcaaaatcatggcggaaggcaaaggagaagcaaaggcatttcttacatggcgacaggcaagagagcgtgtgcaggggaactcccatttataaaaccatcagacctcatgagatttattcactatcatgagaacagcatgggaaagacccgcccccatgattcagttacctcccactgggtccctcccatgacacatggaattatgggagctacaattcaagatgagatttgggtggggacacagccaaaccatatcagtctccctctgtcatccaggctggagtgcactggcatgatctcggctcactgcagcctctacctccctgggtcaggtgatcttcccacctcagcctcccaggtagctggaactacaggtacctgccactatgcctggctaaatattttgtatttcctgtggagacgaggttttgccacgttgcccaggctggtcttgaactcctgaggtcaagcaatatgcccacctcggcctcccaaggtgctgggattacaggtgtgagccacagtgctcggcctaagtcactgcagtttttaaagctcccaggtgattcttcagtgcagtcaaaagtgagaactggctgggtgcggtggctcatgcctgtaatcccagcaccttgggaggcgaaggtgggcagatggcttgaggtcaggagttcaagaccagcctggccaacatggtaaaaccccatctctactaaaaatacaaaagttagctgggtgtggtggtgcgtgcctgtaatcccagctacttgggaggctgaggcatgagaattgcttgaacccaggggacagaggttgtagtgagccgagatcgtgccactgcactccagcctgggcaacagagtgagattccatctcacaaaaaaaaaaaaaaaagcgagaaccactgtcctaggccctgatgtttgcaggcaactaaaaaaggaagtggacatccccagtcagctgtggcgcaccaagaacaagtcatgggaacataacctaattttctaaatgggttactaggcacttagagcaaaacaatgatgccgaaatcctgatttcagcaaagcctctgcctgcctgtcttggaagtatccacatgaggctgctggggccttggtgtccccagcagtttctagtctctaggtcttgctgtgggtgtctgtgcagtgagggtgtgtgtggcgctgggtgagctctgtctaggcctggcacaggatgcggtctggtagctgctgcttctcttctgcagaagcgcagccaagcaccctctggggtttcaggcccacacccagcctgaagttctgggagtggctcactttccaaccttcagggtctcccagcagctgactggggagtggtggagggaaaagggattgtattagtccgttttcacgccgctgatgaagacatacccgatactgggcagtctaaaagatagaggtctgatggactcacagttccacgtgactggggaggcctgacaatcatggtggaaggtgaaaggcttgtctcacacggtggcagacaagagaaaagagcttgtgcaggggaactcccctttataaaaccatcagatctcgggagacttattcactatcatgagaacagcacgggaaagaccctcctctatgattcaattacctcccaccaggtccctcccacaacatgtaggaattgtgggaactacaattcaagatgacatttgggtggggacacagccaaaccatatcagggcgtcccagaaagggtatagggtctgagacccaagtcagcatgagaaagtatgcttctcatggtggcccagttgggtggaagtggcagccgggccgtctttccaccaggccactcaagtagcagctgagagacccctgccctggccagtccccgccctcccctcttgccactgcctctggttctgaacagatgggcaccctcatcttgtatttgtgattaatgtctaacaatgtagttttgtgagaagggtttgctgatacagccttgctgcagatgctgcgaactgtggcctggggcagaccttacctccagacacgccctgaggcaggggagggcactggcccgtagctggccgagagctctcgggttgcgcgacagggatacttttcagcggctgggtcgctatccaaagtgagaaaacgaggagggaccaggaggctgtccgcctcaagagatgtgggggccaggtccagttatctggggaagcagtaagcttctctgctgtttctaaccccaggcctcccctggtctaaggcagggcctcccagcctcggggcactttaaagatatctgggcctggccccatccccacagtctgactgagtgggtctggatagggcctgagcattggtgatttcctgggtgaaaggaggcccctcacagtctctggaagcttctctgtgttaggaaaagctctgggcttgactctgctttgaaagtcaagatccgcaaatcctctcagcctcagtttctccttcagcaagatgaaatggaaatgctgtacctacgtcccggggtggttgtgagacccaaaaaagacaatgttctggaaggttcctggtgcgttgcagtcctctaagaacctgagttagagccacgctgagtctcagcttcttggctccttctgtttcaaactcgtccatgtgatagctcaggaagggtaggcagggccctgccccctactcagaaaacaccatcctggtcctggggatccccgcagcattagtcccctgttttcccagtgtattgagaaaaattgctaacaagcagtggggcacaccaccagcctcctgggttcctttcagtttggggatttttggacattcccaggaatgtcttaaaaaacacttcaaaaaacattaacataaatatttttatcaaagcctgtattaaatggtctttcaagaaaatacagtaacaggtcaggcatggtggctcatgcctgtaaccccagcactttgggaggccaaggcaggcagatcacctgaaatcaggagttcaagaccaacctggccaacacagccaaatcccatctctacaaaaaatacaaaaattagctgggtgtggtggcacacacctgtagtcccagctacttgggaggccgaggcaggagaattgcttgatcccggaggcggaggttgcagtgagctgagatcgtgccactgcactccagcgtgggtgacaaggtgaatctttgtctcaaaaaaaaaaaaaaaaaaaagataaaatacagtatacagtaatagagaacaatccttttttcaaagtagtgaccccaaatgaacaaaatatgcatctagcttaaatgcgaacctggttttctctacgcccattcaagcccctgcaataggggcccttcaccccgcatccatggactcctaaaattatatggaaaatggctgtgtgtgagtgtggatggacatgtgcacacatatttttggctttaccagatgctcaaagagcctaggacccaaaaagggctgagaatgaccgtgtcggccacttcagggtcatcaggaattgctgtgcactgctcacttctccagtgaacactttctgcttctgtgtttcctggtatcctttgggactcctggctaggtcatgtgtttctctactttcaaaagggcttcagccaggcacgatggcatgagcctgtagtcccagttgctctggaggttaaggtgggaagattgcttgagcccaggaatttgaggccagcctgggcaagtagataggtagatgattgatagatagatagatagataaatagatggatagataagtcgctagacagtcatccatccacccatccacacataaaaaggcctttgtcatgtcatgttttgtggcccacctgccagtgttgcccacagttgctgcccctccaaactcatcagtcactggcaaacaggaggaatgtgtggctcatgtctgggcatcagtggctgtgggagacatccttgatcttctccagcttctccttccacattttcctttgcaatctggcaatatctattaaaataaaatgtgcatgccttttgacctaagagcttcacttctaggacccacttacacgtgtgtgacatgatgttcatacgggtttatttatctgaggttgttcatacacaccattgcctgtaatcactaaaggcgggagcagcctacacatccatccacagaggagtagatgccttttggtacatccgtggcgacggaatactaagcagcctgtgtatctatacactcacacgtgtttgtttatgtgtggaatatctctggagggtacacaagaaacttaaaatgatcactgtctctggggagggtacctgggtgcctgggaggcaggtcagggaaggagtgggcacaggtattaccaattggaagacaataaaaacaacagctcctggccaggcgcagtggctcacgcctgtaatggcagcactctgagaggctgaggcgggcagattgcttgcgtccaggagttcaagaccagcctgggcaacatagcaaaaccccgtttctattaaaaatacaaaaaattagccaggtgtggtggcatgcacctgtaatcccagctactcgggaggctgaggtgggagaatcacctgagcctgggaggtcaaggctgcagtgaggtgagattgtgccaccgcactctagcctgggcgatagagcaagaccctgtctcaaaaacaaacaaaaaacagtccctggcactctgggccaggcctggcagggcagttggcagggctggtctttctctggcacttcatctcaccctccctcccttcctcttcttgcagattgaaacccacaagctgaccttccgcgagaacgccaaagccaagacagaccacggggcggagatcgtgtacaagtcgccagtggtgtctggggacacgtctccacggcatctcagcaatgtctcctccaccggcagcatcgacatggtagactcgccccagctcgccacgctagctgacgaggtgtctgcctccctggccaagcagggtttgtgatcaggcccctggggcggtcaataattgtggagaggagagaatgagagagtgtggaaaaaaaaagaataatgacccggcccccgccctctgcccccagctgctcctcgcagttcggttaattggttaatcacttaacctgcttttgtcactcggctttggctcgggacttcaaaatcagtgatgggagtaagagcaaatttcatctttccaaattgatgggtgggctagtaataaaatatttaaaaaaaaacattcaaaaacatggccacatccaacatttcctcaggcaattccttttgattcttttttcttccccctccatgtagaagagggagaaggagaggctctgaaagctgcttctgggggatttcaagggactgggggtgccaaccacctctggccctgttgtgggggtgtcacagaggcagtggcagcaacaaaggatttgaaacttggtgtgttcgtggagccacaggcagacgatgtcaaccttgtgtgagtgtgacgggggttggggtggggcgggaggccacgggggaggccgaggcaggggctgggcagaggggagaggaagcacaagaagtgggagtgggagaggaagccacgtgctggagagtagacatccccctccttgccgctgggagagccaaggcctatgccacctgcagcgtctgagcggccgcctgtccttggtggccgggggtgggggcctgctgtgggtcagtgtgccaccctctgcagggcagcctgtgggagaagggacagcgggtaaaaagagaaggcaagctggcaggagggtggcacttcgtggatgacctccttagaaaagactgaccttgatgtcttgagagcgctggcctcttcctccctccctgcagggtagggggcctgagttgaggggcttccctctgctccacagaaaccctgttttattgagttctgaaggttggaactgctgccatgattttggccactttgcagacctgggactttagggctaaccagttctctttgtaaggacttgtgcctcttgggagacgtccacccgtttccaagcctgggccactggcatctctggagtgtgtgggggtctgggaggcaggtcccgagccccctgtccttcccacggccactgcagtcaccccgtctgcgccgctgtgctgttgtctgccgtgagagcccaatcactgcctatacccctcatcacacgtcacaatgtcccgaattcccagcctcaccaccccttctcagtaatgaccctggttggttgcaggaggtacctactccatactgagggtgaaattaagggaaggcaaagtccaggcacaagagtgggaccccagcctctcactctcagttccactcatccaactgggaccctcaccacgaatctcatgatctgattcggttccctgtctcctcctcccgtcacagatgtgagccagggcactgctcagctgtgaccctaggtgtttctgccttgttgacatggagagagccctttcccctgagaaggcctggccccttcctgtgctgagcccacagcagcaggctgggtgtcttggttgtcagtggtggcaccaggatggaagggcaaggcacccagggcaggcccacagtcccgctgtcccccacttgcaccctagcttgtagctgccaacctcccagacagcccagcccgctgctcagctccacatgcatagtatcagccctccacacccgacaaaggggaacacacccccttggaaatggttcttttcccccagtcccagctggaagccatgctgtctgttctgctggagcagctgaacatatacatagatgttgccctgccctccccatctgcaccctgttgagttgtagttggatttgtctgtttatgcttggattcaccagagtgactatgatagtgaaaagaaaaaaaaaaaaaaaaaaggacgcatgtatcttgaaatgcttgtaaagaggtttctaacccaccctcacgaggtgtctctcacccccacactgggactcgtgtggcctgtgtggtgccaccctgctggggcctcccaagttttgaaaggctttcctcagcacctgggacccaacagagaccagcttctagcagctaaggaggccgttcagctgtgacgaaggcctgaagcacaggattaggactgaagcgatgatgtccccttccctacttccccttggggctccctgtgtcagggcacagactaggtcttgtggctggtctggcttgcggcgcgaggatggttctctctggtcatagcccgaagtctcatggcagtcccaaaggaggcttacaactcctgcatcacaagaaaaaggaagccactgccagctggggggatctgcagctcccagaagctccgtgagcctcagccacccctcagactgggttcctctccaagctcgccctctggaggggcagcgcagcctcccaccaagggccctgcgaccacagcagggattgggatgaattgcctgtcctggatctgctctagaggcccaagctgcctgcctgaggaaggatgacttgacaagtcaggagacactgttcccaaagccttgaccagagcacctcagcccgctgaccttgcacaaactccatctgctgccatgagaaaagggaagccgcctttgcaaaacattgctgcctaaagaaactcagcagcctcaggcccaattctgccacttctggtttgggtacagttaaaggcaaccctgagggacttggcagtagaaatccagggcctcccctggggctggcagcttcgtgtgcagctagagctttacctgaaaggaagtctctgggcccagaactctccaccaagagcctccctgccgttcgctgagtcccagcaattctcctaagttgaagggatctgagaaggagaaggaaatgtggggtagatttggtggtggttagagatatgcccccctcattactgccaacagtttcggctgcatttcttcacgcacctcggttcctcttcctgaagttcttgtgccctgctcttcagcaccatgggccttcttatacggaaggctctgggatctcccccttgtggggcaggctcttggggccagcctaagatcatggtttagggtgatcagtgctggcagataaattgaaaaggcacgctggcttgtgatcttaaatgaggacaatccccccagggctgggcactcctcccctcccctcacttctcccacctgcagagccagtgtccttgggtgggctagataggatatactgtatgccggctccttcaagctgctgactcactttatcaatagttccatttaaattgacttcagtggtgagactgtatcctgtttgctattgcttgttgtgctatggggggaggggggaggaatgtgtaagatagttaacatgggcaaagggagatcttggggtgcagcacttaaactgcctcgtaacccttttcatgatttcaaccacatttgctagagggagggagcagccacggagttagaggcccttggggtttctcttttccactgacaggctttcccaggcagctggctagttcattccctccccagccaggtgcaggcgtaggaatatggacatctggttgctttggcctgctgccctctttcaggggtcctaagcccacaatcatgcctccctaagaccttggcatccttccctctaagccgttggcacctctgtgccacctctcacactggctccagacacacagcctgtgcttttggagctgagatcactcgcttcaccctcctcatctttgttctccaagtaaagccacgaggtcggggcgagggcagaggtgatcacctgcgtgtcccatctacagacctgcagcttcataaaacttctgatttctcttcagctttgaaaagggttaccctgggcactggcctagagcctcacctcctaatagacttagccccatgagtttgccatgttgagcaggactatttctggcacttgcaagtcccatgatttcttcggtaattctgagggtggggggagggacatgaaatcatcttagcttagctttctgtctgtgaatgtctatatagtgtattgtgtgttttaacaaatgatttacactgactgttgctgtaaaagtgaatttggaaataaagttattactctgattaaataaggtctccattcatggattccaaggacaagaaagtcatatagaatgtctattttttaagttctttcccacgcacccttagataatttagctcagaacaggaaatgatagtattaataaaagctggacatcaggattaacagctctctctggggccctgaaggtgagagttctcagacttgctcatttgcagttgcttctttgtgatgctggcaaaccatcctagtcccattcaaagggcaatacaaagccttgtggctgacctcacgatgcagcactcagtttgcaagaccggcaccagtgtatgcaaacctgagaaggttggggatgaggatatgggatctttcatccctggaaatttagtccagaggcctggggctggagcagaacaccaagccaatcagcttaatgaatggcttagattcctgctaggtttgcagagctgccttctttcctttggtaccttattatagattgaggagtatttctgctaaaccaagatagggataaccagatagcatcttcatagcaatgccacaaaggaaaacaaaaacaaaacagtaatccatcatattattccttagtaactatgccaaggtcatgatactgaatccttagattgtttcaaaatactacttttctttgctcttcctgatgtgtttgccaccgcaggcagatgtttaagtaaaacagattttaactgcagctacaaaagcagcaacaggccagcaaaagagaagtgctatctcagagagcatggctttcagagccacaagagacagcctcactggctgtttcagcttgactgccatgcaaagaagagagcagagggagaaccagccccacccacttattcatcttgtacaaaaaaaaagcacctaccagcctaggctacatagtgagacactatctccacaaaaaacccacgaaaactagctgggtatggtggcacatgcctacagtcccagctactggtaaggctgtggtgggaggatctcttgaggccaggaaggagatccaggctgcagtgagccaagattgcaccactgcactccagtctggacaatcgagcaagatcccatctcaaacaataaaaaaaaaaagcgtgtaacctcctcagaagaaagatgttataatctcaggcagca

SEQ ID NO: 84 - DNA, 6816 bp, Homo sapiens
ggacggccgagcggcagggcgctcgcgcgcgcccactagtggccggaggagaaggctcccgcggaggccgcgctgcccgccccctcccctggggaggctcgcgttcccgctgctcgcgcctgcgccgcccgccggcctcaggaacgcgccctcttcgccggcgcgcgccctcgcagtcaccgccacccaccagctccggcaccaacagcagcgccgctgccaccgcccaccttctgccgccgccaccacagccaccttctcctcctccgctgtcctctcccgtcctcgcctctgtcgactatcaggtgaactttgaaccaggatggctgagccccgccaggagttcgaagtgatggaagatcacgctgggacgtacgggttgggggacaggaaagatcaggggggctacaccatgcaccaagaccaagagggtgacacggacgctggcctgaaagaatctcccctgcagacccccactgaggacggatctgaggaaccgggctctgaaacctctgatgctaagagcactccaacagcggaagatgtgacagcacccttagtggatgagggagctcccggcaagcaggctgccgcgcagccccacacggagatcccagaaggaaccacagctgaagaagcaggcattggagacacccccagcctggaagacgaagctgctggtcacgtgacccaagagcctgaaagtggtaaggtggtccaggaaggcttcctccgagagccaggccccccaggtctgagccaccagctcatgtccggcatgcctggggctcccctcctgcctgagggccccagagaggccacacgccaaccttcggggacaggacctgaggacacagagggcggccgccacgcccctgagctgctcaagcaccagcttctaggagacctgcaccaggaggggccgccgctgaagggggcagggggcaaagagaggccggggagcaaggaggaggtggatgaagaccgcgacgtcgatgagtcctccccccaagactcccctccctccaaggcctccccagcccaagatgggcggcctccccagacagccgccagagaagccaccagcatcccaggcttcccagcggagggtgccatccccctccctgtggatttcctctccaaagtttccacagagatcccagcctcagagcccgacgggcccagtgtagggcgggccaaagggcaggatgcccccctggagttcacgtttcacgtggaaatcacacccaacgtgcagaaggagcaggcgcactcggaggagcatttgggaagggctgcatttccaggggcccctggagaggggccagaggcccggggcccctctttgggagaggacacaaaagaggctgaccttccagagccctctgaaaagcagcctgctgctgctccgcgggggaagcccgtcagccgggtccctcaactcaaagctcgcatggtcagtaaaagcaaagacgggactggaagcgatgacaaaaaagccaagacatccacacgttcctctgctaaaaccttgaaaaataggccttgccttagccccaaacaccccactcctggtagctcagaccctctgatccaaccctccagccctgctgtgtgcccagagccaccttcctctcctaaatacgtctcttctgtcacttcccgaactggcagttctggagcaaaggagatgaaactcaagggggctgatggtaaaacgaagatcgccacaccgcggggagcagcccctccaggccagaagggccaggccaacgccaccaggattccagcaaaaaccccgcccgctccaaagacaccacccagctctgcgactaagcaagtccagagaagaccaccccctgcagggcccagatctgagagaggtgaacctccaaaatcaggggatcgcagcggctacagcagccccggctccccaggcactcccggcagccgctcccgcaccccgtcccttccaaccccacccacccgggagcccaagaaggtggcagtggtccgtactccacccaagtcgccgtcttccgccaagagccgcctgcagacagcccccgtgcccatgccagacctgaagaatgtcaagtccaagatcggctccactgagaacctgaagcaccagccgggaggcgggaaggtgcagataattaataagaagctggatcttagcaacgtccagtccaagtgtggctcaaaggataatatcaaacacgtcccgggaggcggcagtgtgcaaatagtctacaaaccagttgacctgagcaaggtgacctccaagtgtggctcattaggcaacatccatcataaaccaggaggtggccaggtggaagtaaaatctgagaagcttgacttcaaggacagagtccagtcgaagattgggtccctggacaatatcacccacgtccctggcggaggaaataaaaagattgaaacccacaagctgaccttccgcgagaacgccaaagccaagacagaccacggggcggagatcgtgtacaagtcgccagtggtgtctggggacacgtctccacggcatctcagcaatgtctcctccaccggcagcatcgacatggtagactcgccccagctcgccacgctagctgacgaggtgtctgcctccctggccaagcagggtttgtgatcaggcccctggggcggtcaataattgtggagaggagagaatgagagagtgtggaaaaaaaaagaataatgacccggcccccgccctctgcccccagctgctcctcgcagttcggttaattggttaatcacttaacctgcttttgtcactcggctttggctcgggacttcaaaatcagtgatgggagtaagagcaaatttcatctttccaaattgatgggtgggctagtaataaaatatttaaaaaaaaacattcaaaaacatggccacatccaacatttcctcaggcaattccttttgattcttttttcttccccctccatgtagaagagggagaaggagaggctctgaaagctgcttctgggggatttcaagggactgggggtgccaaccacctctggccctgttgtgggggtgtcacagaggcagtggcagcaacaaaggatttgaaacttggtgtgttcgtggagccacaggcagacgatgtcaaccttgtgtgagtgtgacgggggttggggtggggcgggaggccacgggggaggccgaggcaggggctgggcagaggggagaggaagcacaagaagtgggagtgggagaggaagccacgtgctggagagtagacatccccctccttgccgctgggagagccaaggcctatgccacctgcagcgtctgagcggccgcctgtccttggtggccgggggtgggggcctgctgtgggtcagtgtgccaccctctgcagggcagcctgtgggagaagggacagcgggtaaaaagagaaggcaagctggcaggagggtggcacttcgtggatgacctccttagaaaagactgaccttgatgtcttgagagcgctggcctcttcctccctccctgcagggtagggggcctgagttgaggggcttccctctgctccacagaaaccctgttttattgagttctgaaggttggaactgctgccatgattttggccactttgcagacctgggactttagggctaaccagttctctttgtaaggacttgtgcctcttgggagacgtccacccgtttccaagcctgggccactggcatctctggagtgtgtgggggtctgggaggcaggtcccgagccccctgtccttcccacggccactgcagtcaccccgtctgcgccgctgtgctgttgtctgccgtgagagcccaatcactgcctatacccctcatcacacgtcacaatgtcccgaattcccagcctcaccaccccttctcagtaatgaccctggttggttgcaggaggtacctactccatactgagggtgaaattaagggaaggcaaagtccaggcacaagagtgggaccccagcctctcactctcagttccactcatccaactgggaccctcaccacgaatctcatgatctgattcggttccctgtctcctcctcccgtcacagatgtgagccagggcactgctcagctgtgaccctaggtgtttctgccttgttgacatggagagagccctttcccctgagaaggcctggccccttcctgtgctgagcccacagcagcaggctgggtgtcttggttgtcagtggtggcaccaggatggaagggcaaggcacccagggcaggcccacagtcccgctgtcccccacttgcaccctagcttgtagctgccaacctcccagacagcccagcccgctgctcagctccacatgcatagtatcagccctccacacccgacaaaggggaacacacccccttggaaatggttcttttcccccagtcccagctggaagccatgctgtctgttctgctggagcagctgaacatatacatagatgttgccctgccctccccatctgcaccctgttgagttgtagttggatttgtctgtttatgcttggattcaccagagtgactatgatagtgaaaagaaaaaaaaaaaaaaaaaaggacgcatgtatcttgaaatgcttgtaaagaggtttctaacccaccctcacgaggtgtctctcacccccacactgggactcgtgtggcctgtgtggtgccaccctgctggggcctcccaagttttgaaaggctttcctcagcacctgggacccaacagagaccagcttctagcagctaaggaggccgttcagctgtgacgaaggcctgaagcacaggattaggactgaagcgatgatgtccccttccctacttccccttggggctccctgtgtcagggcacagactaggtcttgtggctggtctggcttgcggcgcgaggatggttctctctggtcatagcccgaagtctcatggcagtcccaaaggaggcttacaactcctgcatcacaagaaaaaggaagccactgccagctggggggatctgcagctcccagaagctccgtgagcctcagccacccctcagactgggttcctctccaagctcgccctctggaggggcagcgcagcctcccaccaagggccctgcgaccacagcagggattgggatgaattgcctgtcctggatctgctctagaggcccaagctgcctgcctgaggaaggatgacttgacaagtcaggagacactgttcccaaagccttgaccagagcacctcagcccgctgaccttgcacaaactccatctgctgccatgagaaaagggaagccgcctttgcaaaacattgctgcctaaagaaactcagcagcctcaggcccaattctgccacttctggtttgggtacagttaaaggcaaccctgagggacttggcagtagaaatccagggcctcccctggggctggcagcttcgtgtgcagctagagctttacctgaaaggaagtctctgggcccagaactctccaccaagagcctccctgccgttcgctgagtcccagcaattctcctaagttgaagggatctgagaaggagaaggaaatgtggggtagatttggtggtggttagagatatgcccccctcattactgccaacagtttcggctgcatttcttcacgcacctcggttcctcttcctgaagttcttgtgccctgctcttcagcaccatgggccttcttatacggaaggctctgggatctcccccttgtggggcaggctcttggggccagcctaagatcatggtttagggtgatcagtgctggcagataaattgaaaaggcacgctggcttgtgatcttaaatgaggacaatccccccagggctgggcactcctcccctcccctcacttctcccacctgcagagccagtgtccttgggtgggctagataggatatactgtatgccggctccttcaagctgctgactcactttatcaatagttccatttaaattgacttcagtggtgagactgtatcctgtttgctattgcttgttgtgctatggggggaggggggaggaatgtgtaagatagttaacatgggcaaagggagatcttggggtgcagcacttaaactgcctcgtaacccttttcatgatttcaaccacatttgctagagggagggagcagccacggagttagaggcccttggggtttctcttttccactgacaggctttcccaggcagctggctagttcattccctccccagccaggtgcaggcgtaggaatatggacatctggttgctttggcctgctgccctctttcaggggtcctaagcccacaatcatgcctccctaagaccttggcatccttccctctaagccgttggcacctctgtgccacctctcacactggctccagacacacagcctgtgcttttggagctgagatcactcgcttcaccctcctcatctttgttctccaagtaaagccacgaggtcggggcgagggcagaggtgatcacctgcgtgtcccatctacagacctgcagcttcataaaacttctgatttctcttcagctttgaaaagggttaccctgggcactggcctagagcctcacctcctaatagacttagccccatgagtttgccatgttgagcaggactatttctggcacttgcaagtcccatgatttcttcggtaattctgagggtggggggagggacatgaaatcatcttagcttagctttctgtctgtgaatgtctatatagtgtattgtgtgttttaacaaatgatttacactgactgttgctgtaaaagtgaatttggaaataaagttattactctgattaaa

SEQ ID NO: 85 - DNA, 83410 bp, Homo sapiens
ccagccctgcgcccccagcttctccctgctcatccacatcttgggatctcacccctatccctccctcccccgccccacgcgcacactgcacaggcctgttcgtcctgtaacatcatttcccctcccgcccaggctcactcctagacatccctcagcctctgatccgcctgtcacctcctccaggaagcctctgctgcttcctctggacctgctacctccgtggtgaggggctcgcctggcccatccctgcgtctgcagagcccagcactcaggcgagcccagagcagggccgtggagcgcccgctgagagaagagtggacgaaagacaggagggaggagggcgaggaggcggcggcagggggagcgtggggcggaggcggcagcgggagggagcgcgcgcgctggcggcggccgcccagggccggggccgcgcgcccagcctgagcccgccccgccgccgagcgtcaccgaacctgcttgaaatgcagccgaggagccggggcgggcggcagcggcggcggcggcggcggcgggggcagcggcaaccccggcgccgcggcaaggactcggagggctgagacgcggcggcggcggcgcggggagcgcggggcgcggcggccggagccccgggcccgccatgggcctccccgagccgggccctctccggcttctggcgctgctgctgctgctgctgctgctgctgctgctgcagctccagcatcttgcggcggcagcggctgatccgctgctcggcggccaaggtgcgtgcagccggtctctgactcggctctgctccgccctagccaccaacaaagcgcggccgggaggccggagcggggaggggtccagaacccggggctatcgggggctcccgggcggacaggctccacgcgaagcggctattcctgaatttgccctcggccccccgcccccgcgggcctcggtgttgagggctctgccctctgggcagcggatcttgggggaggggtgcaggggggcttggccagcggggaactttgccggaggggcggccattcatggttccggatgagctgtgtgattctcgccgttggggtttatttgacacgcgcgctccgcggcggtaatgagcagagccgggcggcttctccgcttgacaatgcgtttccgcagacccctgcgcgcggcggagagagagggggctgcctgccagggtgatgtgcctgcggctcccactgcgcctggcgcgcgggcgcggggactccctatgggctgtatctgagcagatctctgactatgggtcgcgtgtgcgggtgagtgcgtctgaatggagggtatacccaggtcgtgtgacactttaagtaggtgcctggtctcgccgtgccaccgagcggcccgacatccacggaacccctgccatcgtgccctccctttggatggagtgtgcctgaagcccccggggtctccataatcgccccctttcctcctccccagcgggtccttccgggtggcccggactgcatggtggggagtggggccgagtccgctgatccagctcacgctccctccccctcgcagggccggccaaggattgcgaaaaggaccaattccagtgccggaacgagcgctgcatcccctctgtgtggagatgcgacgaggacgatgactgcttagaccacagcgacgaggacgactgccgtgagtggcgggccagggagctcagacccggggagagaaaaggaacggtggggggcaccatgcttggcgcgcacgtggctgcagccgccgcgctgccacctgcgcgggacttgccgccggagcctgcgaccgggaaaccgcctgggcaccgcctccctcggggccgggtggctcttagcgacccggagcgggcaggaaagctggcgtgtcctggtggggccggggcggagccccgggcagtgtgccggaggaggaaggcgcaccatgctggggagactgaaccggagctgtgggcggggacgcggcagtccctgcaaaggtctagcttcccgaaacacggccctctcggactcttgcctcggccccgcgggacgcgcgcgtgtttcaaagttccacgcagctccgggccgcactgcgctccttttcctgctcagtttttgtgaatgaatgggctccccagggcccctgattggctgggcgaggaccaccccataggcccccgtggccggagcggccaatcgcggagcagacggatgtgtagtattcgggttccctgggcgcgggggcaccgccctgccctgccccggccccgccccggccacacccccgcgcatatccttagggtggtaggtgcaggcggggctcgggcgccgcttttctgccgagtcacagtgaagacctttttgagccaccctggttagcagaccgcgctttcctgctagccctgcccggctctgagtcatgtggcacaccaggaaggagggtaccaggagggagagtttgtttcctggaaggggcccgagaagcccgaggccacgcgtgaaacggctgccggccgcctttgctgggcgtgcgcgactgatttagaagtttcttctcagagtgcacagggtttcagagtgtctgcgggaccgggagctagttagcaggcagttgtcacggtggaagaaatgtagctccgggaacagaaaaacagggctctcctagagacatagacccgggcagtcattcattcatcattcgggagcatctgctgcgtgccaggcgctggggcgccctccaagacaggccagccctgccagccagggagcactgacggggtctgagggaggagggcgacaggtggacaggcccacagccccacactgcacaggaagggtcacgggacacttggacaggcaccctctctgttgaatcgttttggtttttgactgtttgccagtcaccctcccgttcactttcagacctaacccaaagttggctttgtgtcttgtgcgtggcagaactagactgactgagtctatgtctctagcacatctttccctcctgcctcagtttcctcacctgaccacttgggttcacataattcctgccccagcaacatcattggactgttttgaggaccagttctagaagcgaaattggaagtaatgagactaatgtgtgctgaccattaactgtgccaagcactgcagtaagtacttatcttgtataaactcctttaatcttcataacagtcctattttagagattaaaaaacaaaacaaacaaaccaacaaaaactgaggcactgaactgtgaagttacctgcttagcagctactgagttgttaagtaggagcctgaacttaagcatctaactctagagttcttagtctaatcatgaccctggaccatttcccagtgctgttgaggttatgaaaatggctgtgccttggtaaaatattgcagtgagtttcctcactgggagttgttctgtggtctccttagagtgggagtactgaggacgaggcaaggaatagaaactgcgtgtctgggctggttatgccttatctccctggctctttataacaactgtccttgtgaggatggctgtgaaaagcagaaattttcttgtcattctactttctagataaggatgcctcctcagagaagttgagtgacttatgcaaggtcacacagctcaggatgacagaacttggtcaggatctctgcctgcctcgagttcagggcactgtctgctgaggtggggagtgtggtgcggaaagcaccaggagtgtgatctaggagctggaaagacgggctttaaatgttaggcctggtgcgtttcagctccatgtgaggctttggacgagatggaggagtaaagtagctgggtgctgagtgacgctcaggtgggccaagagagctccaatggccaagctgggctcctgcatggctctgagatgcatggggtagagtcataggcagggagttattaaacaaaagtgaatgacgtcaagcttggagtggaaagggtggcggcgctgctgatagtaccaagtagtaatcacacatggcttggcttttctgagcttgtttcctcatctgccaaacaggggcagctgtccctccaacgctggctgtgcacatagacacacagggctggcaagaagggaacggatggatgagtgttcccacctccacggcctttagaaacggactcctggtagccataaagggaaactgaagaaacggagtggggcttacgtggctgtgttggggccaggtgctggaaaatgttctttcctcagcccttcccgcattctaggccacctgcccagactgaatttctttgaactgttctccctgcaggagagagagctgttggctcgtccctgaggagctctttattaaacctgggatggaggggtgataggtgctgggataacaaaatctgctcctccctgagcagtctccgtgccttacccctgaccaccctctttggcacaccaccctgcaagagggcttgagctgccccacctttgtacatctctgggcctgcaaaatgggggttggaatttgtagatagagtctgcgtgaggcaaaatgagtccaagttcccaaaggggccagaatgcagcccctgaataccaagaggctggaaggagggaacttttaaggaagccaagaaaggcttcctggaggaggagactgctgaactaggcctgaaagatggtaactaatagcattcccccagagtttaccatttaaaaacaggtggtattgttcctatattatagaggacataggcttggagaggtgaagtgactcccccaaagtcacagagctcctcagggttggagctggaactcaaactgaggccttctaagtcccgagcctcatccacagtggctgggacttggctctttggagacacagatggagcttgcgggatggaagagggaaaagctcctggggctttagttctcagctcaaagaaccttcaaagtggaggaaggagctggaagctagagagccaggcccaaggaagcccagccaggggaagtcgggtgggattcctggctgtgggcctgggtcacgtaggccagctggcccctgggcctcagtttcctgttgctccctagtgtctgggggcagaggcagagattccggtctctggcctggcctttactcccagagtcacaacagtaaccatagcgccgatgaacgctgtctgggcacttgctgtggaccgggcatcgtgctgagattgtccacacatcgcccctcgttcctctattctataaaatggggcaacactatgaagtacctgaaatagtcctatctcatcgaggcacagacgggttacgtaactggcccaagggtgtagaactgctggggtgtgaatgcgggtgaccagctatggaacttgtactgtctcaagtactggctggtgacttaggtaggtccttcccaggccttcatttccctgtcttgagatgacatcttaaggctactccacctcgcttcctcctctaggaagttctgtgcttctcgcggaaaggctgggtagacaggtggaccagttttgtgctcactgacctcgactttgttcaggcttctttggactcttttgttatcccagcacccatcacccctccatcccaggtttaataaagagtggccacagggaggtctcccatggctgagagttcattagctgggcaaggccaggctgcaggagtgctgagtcttgctgggaaacagcctcataaataattaaagctcggccacagctccctgcctgtgctgtagcccgcatctggccctcagtgtgcggcctggacgtgtgctcctgacactggacccagcctcatctccttcgtggatggagccatctgacgacagtgtggctcctttctgaacctccccgtcttcacctgaccgggcaactccaccatccagagtcctcctggggctcccaactatccagagaataaagtcagtgtagactcctctgtatttggccctctgtgacctgctcctgttacccacttccctgcaacctcttcccgcctcttcctgtgagcctgtgacaccaaattagcttctgccacactctcaccctcctgctgcttctcacctccaggcctttgtgtgtgctattcctcctgccggacaccctgctccctcactggctggattcattttatcatcctaagagatccggtgcaggtgtcacctcctctaggaagccttccctgacaccccattgcctccaggctgagatacaggatttgagttacttagagacccatgtcaaagtcacaactcagacacacctggtttttacatcccagctgtcgcctcctggatgaatggttgtgaggatgatactaggccctccttttcggagattaaatgtgaggattaaatgaggtcacatgcctggtaagcaggaggtgttcagtgaatggcagtgggtgaggttgttcttggtgggaggggtttcactgaggtctctaggtacctgacgtctggtctttgcaggccaacccggaccccttgcttcccctgctcctgtctgcttagccagatgtcgaggttcctgcagctggtgctcgcctcagccagggagttgcccagccaccgtagaggtgacagaaagctgcttggaaaggagctgggggaagaaatgagtcaaacaggcctagggccctaggaggggcagcggatggcttccctctggctgtgtgctggtcctagaggctggcttctgtcctgtctgctcctttcctcttggctgtgcctggggaggagaggagggcctgcatcccccatggcactgcccagcaggccctagcaggccttgggagtgtttgctgaagactttcccttgggccctcccaggtcagcattccccggtgtgagtcccttgggcctcagggatggttggcttcttcctccccagttgtctgctggtggccgacttgacaactttcctccttggggaaatgctggtagcaggtgaagccagagagagagagacccccagggggcagtgaggagcgagagcccagagggcggatggaacaggcacgcccttgaaggaagtaaatgcatgcatgctctcccagcaccaggttagtggtctactcccaggcccatgctgtcccagggggccagcactggggtctgtgggagggtgtggggttgtgtccttagggttgtggagccaggccttgcagccccaggcctaagtaacgttggtagcacctgccccccaaatgcccacacatccagatcacccaggctctgaaggcctggcagggatgccacttcctccagagatgcctttctagacccctgtcctccagcccctcaggccctgagctcccacaacgtgtcctttttcttcccgcagttgcagatccttctcaacattgtgcactccgccagccttgtgctgggcagtaggaattccaaagtcgtttcctcaaggggtagctaataacagctattggctgcctatatcccatgcctgggaccacgttggacaattcacatcctttaacttcactactcacaaccctgggagggctagtttttcgttctcatttcgaagatgatgaaactgaggctcagaaaggagacggaacttggccaatgtcatgaccattaagtggtggagccaggagctgacccaggtctgtctggtctggagcccagactcttcttaagccgttccccgctgagcgctgtctaccctggtggggtcagaggctggtgcttggagggtgtgggaggaagtagggagcagctgcaggactcagcagtgcctccctgagctaccagtttctgacctggggagtgggactggggagggaccctgttctctggagaccccgcagagccctcacataggccttttccagctcccatggggatgacattccagttttcataggcttctctcagcctttgcctgttagatgctgattcttcttctgactgtatggaaggggaaactgagaacctgatgatagtgatgcacatgacctcagggagtgtcagcccagggtcatctcttttactctctgtagtaacacggggcctggctgcctcctcgcacccaggcttagaaaggtgaaactaaggccctgatggtcgaattggctccatcgtcagtagggcaccattctcagaactcaggtgtcctcaattctgggtgggactggagtcagaactgtatgtgcttccccctcccacccccaccctctttgttccctgctggatccgggaacagggtgctctcaggctgaggggtggacacaagccttttgcagtaccgaagggctttgggctcctgactggggacctcaggtgcaccactggccccactgggccctgcttgcccacttctggattgccaagaagtcatctaaaatactcacgttaacactaagaagagttagggagcgagctagtgaggggctttctcatgcaagacctccttcagccggtgccttgaggtatcatgactgcatttcgcagaggagagaaccaagactctgagagatgaagtcacttgccccgggtggccccgctggtcagtggcaggactgggccatgcctgtctggctgcaggtctgaggcagctgaaaggagatatgcattcacacatcccagtcacgatgacagtaaagtgtggcttgcaggctgtgctggggcctctcttcctttccaggcgtccctctttgccagcacctgctagtgggtgtgccaactccctcctgagcagcccagccccttgggcgccctccagcatgagctgggtcccccggcagcggttttaattatcagccctgctcaccccagctcctctcacaagctgccatatgtcatagactccagtaatcaccccgcagccggagtggcaggggaggggctgagggccttcaggggaatcctgctcagtcttgaccgagttcctcactgactgtacccgctctgacctctttgtctctggtggggcccagcctaggtacccacaatgggagagccgggcctagctgctttgggggcatagaatgcggcatgctctcaggcgccatggagtgtccttgggaaactgagagtcacccagcgagcccagggctgtggggctcatgtggtgcacacagttcccatgacccctcatggcctctacacgcctgccccttggaacgtggcatgtggcaggacagacaccccaaagctgtctgccagtctgtctaggagtccacgggagtggtcatttggcccccatcctcccctggtcactggccttgaggtaccacaggggacttcatcccagccactctggagggcatcttagtttccagccctctcaacctgccgtaatccttggatggcttttccagttggtgcctcacaggtgtgctcctgggaggcaggcggtgcaggagttcattatgatccccattccttgatgaggaaaacgaggctcagagaggataagagactcacccagttattggtagttctggagctaaaactcacttcaactgattttacttatttagttttccagggtaagtaacttctggttagctgaaagtaactttacacttgtaatgaaaaacatagttaataaagaacaggaaacgaaggttgcagtgagccgagatcacaccactgcactccagcttggacgaaggtagttctcacccttgctagtaccactatgtaagcagcatagccttctagagatttttctctgcatgtgagctcttgggcatgaacatatgtattttttttttttaacaaaaatgaggccatgttatgccggttgttttcacatatggctttctatggcaataacagtagttcacatccttgttttaaagggctagatagtattgtattgtgtggatcttccataatttaatgacattttctcccgttgatagatgtgtgtttggttgcttccatgtttttccctgctctgtgcaatgctaggatggacatccttgaactccatccttgtgcatttgcttggtcctttctttaagataagttcttaggaaaggagctgctgagtgtgtgcattttcatcattgccgttctgctctctagaggggagaatctttcccatctcacaactctctccctctatggccccatggctctcctttccagcgaggcaggcagctgaaggacttccctcttctctgagcacagggccacctcattctggtcccatgggacaaagcagccatatccaggccacagaaagcaaagccaggagagagaacaacgagcggtgttctggccccaagggctttcacccccaccaaaaaaaaaaaaaagcagaagagtacaaaactgttccttcattcttctcaggatattggtagaaggcatctcctccgcagcgttctaattcttctatctatgcccctaacttgctgtgtgaccttgggtgaatggctctccctctctgaacttcattttcctttcactcattggtccttattccacctgcactgcccccagcacttggagcagactcctgtgcctggagctgggttcagggctggagctggccagtccttgcctagggcagggatctgtgccttactacctggtgacagtgcggggagtatagctggcttggtgggctggattctgggcagggaaacagggcagctggactccttagctccacttccagagctccaccctgaggcccaggttccttgggtgactttcccttctgccttcttcctgcactcacaattgggccggatgcagtgcagtgatggagaaaaatggagtgaggcccaccagcttcatgagactttccgaaagcgggaaaatgagcccatattccggaggtgtgcgggctgaggaaagtactttgcccagagcctggccctgaaaatgagcgtttcccttcccttcctgagcctgtgattcctgcacagggaatggctgagtaaaaggaaccgtcctcagctttcctcctcctccaccaaggacacaacaagagggcagcagcaaaatagcagcaggagagatttaggtcaactggccagttgggaggacttggctgcctgagagaacagcagctcctcgggctgggagggactgtcggagccatctcatcccaccccatctgcgctggggccccagggtggctgcttcctgagtggcccagtggggctggttagccagccgggcctgccacggtagttagccacgtggggccttggttccccagtgggtccaggctaacatcagagacttggcagctgatgagaggcaggaaggtcccatcaggcccaggttaagctgcccgactgaatagctggaggccaagggtgggctttcctggtggcctgaatccagggacattcaagccagcactcctcccctccctccctcccccacttcctggaccctgagccgccatctgctgccctacactctcagagccctttctcggccatgggcatgggcacatgtgcgtgtgcttggggtgtgtgcttcagaggaggggctgtgtaccaggagggaggtgactattctggacccgtggaggctatggggccaagatgacactcttctcccatacccgctaagtctgcccaaaccaagccagagctccccgcctccccaccaggccgtcgtggtggggaatgatttgtagctggagaggcgccagcagtctctcttcctggcctgccccctgccacagcagcctctcctccccaggccatgtgtgctctggtcccacccggagagggctgcttgttataaacagcagccttcctcctctgctcccaccttgccgagtggccatttggcagatgcttgcccctcttggggtctctgccccttgggagtagggcatctccagcccctctcaatcccattctgtggaattcttttgttttcccctaagagtcagggattcacatggtgggagtctgccatggccaggccccaggtacagggtgctccaaggagctggccctgttctctgaggcccagggctggaagcatgggggcaggggctgtgaaatccaaccccatggggccccaacaggagacatggcctaaaccacacaactgtttattagcagagcctacatctactggaggctttttacacctacttatttttgtgctgagctctgacggggctgattttttaatacctatgagccagtgagagcagactctacatcagctgcctatgcaacactcttttgtctccctcccctccccattcccagcctgcctctactgcctactgtaggggccaagtggtacatcaggccagcgtggcctctccagcagcagccagacctggcttccagctgcagctctcccacttcctggttgggaggccccggggcaagtcccttgaatggaaccccagactcccgctctgaacaacatgggtaataaataattcctggcctatgtaaagtagcagaaacctccttggccctcagtgtgtgagttccatgagccagtcggttcttcttacaccactgaattggaccaagcaaaccagggcagagtggtctggcagcccatgtggcttgagcccctgttctctctgccacctcccccaccatgccttgccctcccctctggcccttggtctctcccacccttgaagatcctgtgctgatgtctcccctctgtgacagaggcctgatcccttgttgctgctggctaactgacctacctggctggctgccctccaggctgtcagcctcaccttgtccccaacatgccatgtgatctgggtgtattcctgctctggggctctgagagactgaggattagatcagtggtttgtgtcacttggggcagctttttaaattctgccccagccccttccaggcccatttggtgcgaagccagctgggaggtgtagatgtgcaagtccccaggacgggcccctacctcatccaggagaggatctatcacgacatggataacagcagggccctaccaggccgcctggggtcaagtccacacctcaccacttcccagatgtggggccctaagcaaatgacttcacctctctgagcacctgcctcatctggaggatggagccgcccctcaaggtggttgtgggattgacaggtgagttaacttctgaggcacactaagagcagtgcatggtgcatgcgcagtgctcaattcaagattgcctgggcttcttttgacctccttctctgaacctccctctcccatctgtccttcaggaatccccatccttactgggctgctgcactgcggggtggagtaggaggagccagggagcccccagaaagactcctttatctccctttctcccctgccgctccaggctgtcacttgctggcccagtttaattagggagaggccttctagggacctcattaggaaatgagcccagagccttagggaccttcaggaggggtggggtgcagaaggagattacattatggttggccctgcctggcccctggctttgtgccctaaatatgcctaggaagttatggacacttggtcctttagtggccaggacacaggcctgtgacatggtgcatggtcagccagggctgaagggacccatgcttctatctcctactccccctgggctctggcctcacctcccagatcaggatggagaagggtgacagaggaggcttatctggttctgctccacccagcccaggtgcccactgtccccagcgtggctcagagcaggccctggtgaaggtgttgagtgaatggatgtgtgagctgtgggcagcatcttcattaggccaaagcggcctcccccttccatcccagtgcaggagtttcctcagcagcctagtggggtggaggtcagggggtccaatgcgtccggggactgggcgctcacccactgacgaagcagctccccgcccctggactgctcttcctgttagaaaacctgctcttctgtcaatcccagatctgtctcctgcagctctcctgccctctctgatcccagctctgttaatggggcctctgcttacagagtctgcccccaccttcacggcaagcctgccccatgtcccttcctacctgcattcttgccacagcccccatgcttagggaagtccagcctgtgacagctgacttgtggtgtgggctcagataaggaccatcctctctggggccattgctgctttggctcccctagcatggggcctggtggcgtgcacattcgcaggctctataaatgttagctgcatcctgtgacttgcctcccagggctttgagaagtggagggtgaggacagaaatgccgtgcctggaggcaaaggtatcgttatggacagcttgctctcctgggtagcagggcagcagcgcccagatcctgcaatgactgtggcacagcacatagcactggggggctgtggctgaacgtcttctgcctcttggactaggccggagtgcaggcattgcctgggccttgggcaggaacctgggagtcatcacaacccctctcttccttcccccaaggcctcaccttgaataggggaaggaagaaggtcccgacactcaccctgcctacctgccagcctgggcctcccccgcccctgccacccactgccatgcccttcctggatctcagcagcagcccctgcctagtttctgttctgtcctccaaacccatcttcgctctgcagctgagtgctctgagagatgcaaagctacaccctttcctcgctcagcttctgcagtgacgcccacccctcataggaccaagtcttcttaactgacattcagagcccttcaagaccagacatgtacctgtctcctctccaggtctcacctggcactgaccccaagccccaggcgtctcctgtccagccacacctccaagagaagcctcaggcccttttgcatgcaggcccctagcctggaaggctccatctctgcttgtccggcctcacctgacctctggagtcaccatttccagggtgcttcctcccctaggtgggtcagagtctcctctgggctctctcatccttgtgtttccccacactctataccatgatgtcctgatttagagtctgtggttcacaatgcagtccacaagcctcagggggacagggacctgtggaggacggtggaggaaggaggggtggagggtgcctctgggctccgagtgtgcactgtgcccctgaccccttgctaggtttccagcccctcttgccgcacatgactgggtgtggttttctgtgagtccctgggaagcgcctgctgtggactggagcctttgggtcccagctccaacattcactgagggtttgttctgtgccaggtgccctgccagaacctggggaggatctacagatgggaaagcaggccacgccctgggggcaccagcccctaacttaatgtgtgaccttttctgaacctcagcttcctctgctgtgaaggggatgaggacccaagacccttccctgttaccttgggtacatctatgctgtggctgggatcagacatggccccgcatgaccctgaggctgcagctagaccagaacttgccctccactgggcctctggaacactggtccaagcttcacaggagcaaggggtgagcagaggttttgctctcttttcagcgaaaacgcccacttcatttgcccagcacgtcagcattgccatgtgcttgccatgcataaattgaacacggctcctcggctgctcagaactatcccagttttaaaactcaacatcctgcatctcaggaaccccttcagttgtgagcaaactgggacacttgaccagtctagctgagcccccaagccctggccactgctctctcaggtccccaggaggtcctccccatcccttgtggaatctgctagctgggcacggctcacttaattaaaaacaaagaaaaaggccaggcacagtggctcacacctataatcccagaattttcgggaggctgagatgggaggatcacttaaggccgggagttcaaggccagcctgggcaacatagtgagactccgtctctcaaaaaaaaaaaaaattagccaggtgtcatggtccatgcctatagctacttgggaggctgaagcaggaggattgcttgagcccaggagtttgaggttgcagtgggctatagtcatgccgctgcactctggcctgggtaaggaagccagaccctgtctcaacccctgcctgccaaaagaaaagactgatttcttcctcaccttttgggagaactcaagaaagaaacagaggatcttggaaggtctggaagagcagggccaaacattctgagtagggagctgtgtggatagggccaggaggcctggccgctgttacagactgcctctagcccagctgtgtgacctccctccctggcctgtttccccatctctgccctgctcacctcgtatgactgtggtgagaatcataacattcatgggcctgcctgtgttaccaccgccatttctattcttccaggcatgtggctgtctgtctgtgtcccatgttggcctcactcctcccaagtggagggcagcactgagatcgttgttctcatgatgaatagaaagaagctggaggcgctggccacgtgccttgtatgagtctctgcagtcgacaaggcccttcccacatgttgcctccaggctcatggtggcccttgggaggtgggccagcaggaatgactccacccattgtacagatggggacactgagcccatagtcccacagcatctgactccttaatggtggggagaagggaagccacatgggtggctgggctgtggccgtggcgtgtggtggttacgagtggggtcactggttggctggtcctcttcccctccctatgcccactctgtcgatgtcttcatcagtagggagagatggagacagatggaagagaaggcagagacagaggagtagggagagagagatggggtgggctggggagcacactggggaggctgggggcagggagggtccacgcagtatcgctccttcctctgtggttctcacagtctgtctgcaccgattcctgacagatggagggaggagagagctagtgccaagaggctgtcaccacaggcgggcagagttgggggagggcgctttgtggccagggcttgtgtggggaggggaagcagctggtggtctggctgctgggcctccttggagcccacaccccaggaactgccaggggacaagaaagtgggcaaagggtaagcccgccacctgcctgggactggccgtgcccatgcccctgtccaggcagagacagctacccctccccgctcctcacaccctgctgccagcagggccctccctgtaaactatggattcctcctgcgcacccctcactcggtgttgggggtgggcaggggcctggggactggccctgagctgtgatgggggtggaccagggcagggaggcccccgggataccggagggcatggcagctcagagcaggctggggtctgggtcttgcatctgctggctggagctcagccctcactgtgctaccctggatgtttcccaagccccttttcatggcatagggcctcctgcatttcctccgggctctgaagcatgtgcagggctgggcaggcatgacccggggtcgatttggcacctttgtcatctcctgtgtctttatagtatggctttcttcaggcaggactggctttcatgcactctttcccaaccccccagtgcccatcacagggcccagcacagaggaggggcccattgtatgcttgttgaatgaatgaatggatccccctgcttgcatacctcctgggatggaggcctcactcctttatacaacaattggttccaagattttcagaaacgaagttctttctggttcttcccgagaggctccatggctcccaggcttgccacaggggccacacagacaccctggctgatcctgcgtcctcagagcagcgcagaaaagaccagagacctctgagccagcccagctcctcacaggctcctgcacggctgggtctccactgcactaacctctgggttgtcagtaatcataggtgtcacatatggagccctcactgtgccaggcagcatctcattccattcacatcagcctgtaaggcaggtagttctcatcccccatttacagaggagaaaaatgacttcctccaggtcacacggcttagcaggagacagaacatctgagtcaggagggtgggaggtgggctggggtgggctggaggaagacctcctggagcatgggattgtggcagggcttggggatactgggggcttggcaggagggggcaaggctgaggaggggcccaagggcttttctggaggtggaatctgcccctgcccctgccccagcccgtctcttccctctccccatgctgtctccaaatggatccctgacaccaagactccaactggggtagtcccagaggtgagacctgtgaacctggggcccagagcccttcctgtccccctgaaggccagggtgtgggtatgctccggggcagagctcaaggccgctaaactgacaggaaaggtcagtccagtgatccgagacgtgcagggttatggctgggggcgtggggactcccatctctggtgaagcgtcggggtaggtgggtggggctgggcttcctttctgctgctgctcaaagttggttctgctcagaagcatcctcccattcatatgaataacggcgatcactgatgataaatgaaggtgtgcctgccccgtgccagggctgggctgggtgccctggggacagctgagaggagtcggaggtggaatccatcctgagagcaggggcacagctttcaccacctttatctcatccccggagcctgacacaggctgggccctcagggggcagcttagtaatgccttagtcattgaaaaacagggacctggcctctctgacgagatgcccactgtccaagggtacactggtccacagcatggccccgcagcctgacctctcccctcaccgtggctctctggatccttcaaggggctcctgccagtgactgtagtgggtgactggagcctcttcccccaacgtcacacagcatgtgggctggatgagccacctcccctctcagtgtcttggtttcctcttctgcacaggggcgtcttggcaggccctacctcaaagggctgttggctgggaagattaaatgagatgatgagccccacgcactatcatcaatgacgcttatgcttatggggagtggggtgggaagcacctctgctctccatgcatgacttcatgaattctttttttttaaagatggagtctcactctgtcgcccagcctggagtgcaatggcatggtctcggctcactgcaacctccgcctcctgagttcaagtgattctcttgccttagactcccaagtagctggcattacaggcgcctgcgaccatgcccagctaatttttgtatttttagtagagatggagtttcatcatgttggccagactggtctcgaactcctgacctcaggtgatctgcccgtctcagcctcccaaagtgctgggattacaggtgtgagccaccgtgcccggcccatggatcctttaacagccctctgaggggggatctgtcctgtctctttactgatagagatggtgaggcacagagaggtggggaaacacccagggtcacgtagcataggagtggcagcagcaggatttaaaagcgggtctcttgcactccaaggtccacgtgttagccagtgcaccaggcaagggataaaggacttagtgtgagagctcctttggaattggagttgcagaggctctggcttcctgtgctgatctcctgcaagcctccagcccccagtcacgtctgtcagcagctctgagagccctccttgggcctctcacctcccacatgagcagggaatcagcaggcaaggtccgggcggtgaggatgggggatttcccgactcacttgagatccgtcacattaatgttaattaagccttgttaattcagccctctgcttacacatggctcctgacagcaaattgctcataagtgaggcagtaaatttattgctgctttttccaaacatttagcagcaaagacggtgccccaggaaaggcagaggagagacctggagggccagtgatgcttggttcctgctagcctgaaccccccaggatcctcatggcctagagaataaggtggggctccccaggagacctgggtgagaatgaaattctggcctgctcggagcatactgcctggagatgcggtgagcactgtctcagcactaactctctggtagctctgtgctctgtgaacatcccgttccctgcgctgtcctcccacagtgccttgaagtgtgccctgcacagtagggctcagcaaaggtgtgtttggatttggatgtgcagccccgagcccacctccatgtcaggaaagcctcgctgcagtgcagtctgataggagagccagcagcctccgcagggactgagcgccctgcatcctgaggtgtgcacctggggccagaccactccgccagggctgctgggaaggggtctctccctgtcctgggtcataggagcactgttggaaccaggatcaggctcagattctgggcctgtgaccccagccccttgctaggctaggtatctactcaccaggtgagggggaagcctctcctgggtatagtgggacaccctcgtcctaggtcctgcttcccgccttggcctcagactgggtcgtgcctggaccaattgaacaaacccaggctttgggtacctagaattttaaaaaattaattagagcattaaatggcagccctctgggagaatcccaccatctggctgtcatgggagaggcaagaaaatctatgcatatttgtctgcagtgtgtgagcatcatatgaagccaactgtgcatgtgtgggtatgcggtctgtgtgctgcagtgtgtgtccagcatgacatgcgtgtctgagtatgttcagtatgtggcgcacacctgagtgtgcaagtgggtggtgtgtgccttgctgtatgcacgggtgcccatctgcaagtacatgcgctgtgtgcatgtgcctgagtgtctgcacgtctgtctgaacatacctctgtgtgtggtccatgctcaggcctgcctttttggtgcagtgagccaggctgagctgtgtgcagatagggaaggggctcgtgactcctcctggctgaggtggtgggcacagacagctgtgtagaaggtgggacggggtaagtgtggcaagtgcacagctggccttcagtgggtgaggcagggcaggcatccttgccctcatttgacagatgggaaaacccaaaactggagcctgggctctggggctccctgcgtggtgctctttctgttccagcgggctgctgccctggctggcacctatgcttttggcatctttatgctgttagattttcatggtggctcaaagtggttctgagagagtaccaccccccctactcagtattgctcagggggcaaggtcaggattcccactgcacatcctgtgttcttcctgtttcaaggaggagatatcagggctgctggagaatgctgggcctgatagtcctctgactgctgtgtgacctgggcccatcctgtccctctctgaacctcaggggtgattgtaagaactaaatgaggagacatatacaaagggcttcgtaaaccaggagatgaggtgaggtgatgtagacagatgagggcctggcccagagatggcatcacaatacgatcagagccaaagctgaggcccaagttcatgtgtcccagggtttcctgaggagcaggccaggaggtgggacccaggacagaggcaggtgccctcccagccttgcagactctgaacctgtcctcagaaccatctgcctggtgccagcactctcctccaactccagccccagacacatggctcatggcagtgaagtaaagcaggaacagacccagggagcagtgggatccaacccctcaactggtgttgacgctgaggcccagagagggggagtggcttactcaaagccacgcagcagctcggggggtagagctgggaccaaaacccaggcctcctggcccctggctctgttctccttggtaccataccactgtctttggcaagagaaagaggacacaagagctagttcacatgcctggagaaaaggatgtgggagtgccacccagctagacagcactagaacagaccagagccccacttcctgcatgaatggaggatctgaagcaaggcttcaatgattactgcttttcctaggtatgcagaatgctggagggtaaatagggtttgtgtcctgggctgtacattctgtatagatggaaaagccccaggcttccagattgcctgcatgcgatgccttcagcacacgcttcctcagtgcctgcctccaccgagctgctagtctggtagagaaagatggttgagtgccaccaacacaggatgatgaggctgtggatcagaagaggtctctgatcccacatggggtcgtggaaagcttcccaatagaatagagaaggggaggagggtcctccactcccaactcccagagagtgaggaatgtgtgcgcctcagacaccctggccccctggcagtctgggcctcataagagctcatgcttgggcaggctcaccgttcaccctggagtgggtggctgggtgccttccagcttcctcctcagcgcctctcctgtgccagggcccatgcacgtgggtggaggagaggccattctagaggcccctggctccctgtggggctgaggagagactagtgtgggggcaggggtggaggtgcagggaagctggtggccagacctcctgtgacctccactcattgcctgtgtgtccaggtgggccagtctcagctgccccgcttggcgttataaccattgtggtgttagccagggacgaggcttctgaagtagcctgcactgtgagccccgctggctgccaggtaataattccacccgccttgacctttttctccaaggaacaggccttctactttatacatggagaaaacaagtcacagaagaaccaggtggcccaggatgacagaggctaggcctccagatgccctttaaaaattgcaacaaaaacctcttaaggactcactgtgtacaaagcctggtggtggggctgccacagcggctgggataaagggaggaggaacttcggtcactgaatattttctgtgtgccatcccttatgtcgggcactgatagacgtgatctagcaaccaactgccctccgagtcaggatctaccaccacatttttaaatgaggaaacatgggctcagagcggtcaggtagcctgcctgaggtcgcttagctagtaagggacaaaggcgtgatttgagtcctgcgttccttcacctgtttttgtgggagaatggccatgtcaggcagcagactgggatcttccaaaccttagttctgggaggaaggttcacttgcaggaaaaaccaaggtgagtggaatcatcttcaggcagccagcagtgctcactgggcaggctgtttaaaagtggcttcctcttcaagctgtagtgggacctgtcttactgggggagccatgctggctcagaacccctaggctgatgggcacccctctgtaaggggctctgagaagtggccggtgtggctgaggtctgggccaggatgccagtgggcggtgagggtttgctgggcacatgaccccacacctttcctcttcttgcctcccacagccatgtctgtccccttctgcccagctctggttggaggtgctgagctggggcttgtggccatgaaccatccccatactgctggccctggggctggcctcagatgggtgggtggtcccggccagagccctgaaccccggccctgccagaaccaacacctggagacatggccacctccgaaggtcttacctaactgcagggcgtgccagcatctagcagggtccctcacgcacagttggcctgctgcttgattattttggcttccagcagcagagacctgagactttcccggtagcataggagtcagcagaagcttggccttcccagaacatgggaccagaggaggtgtcctggacagggccaggtgaggggaggctgctggtggcccctcactgagcctttctgcagtgggcctggggaccccctctgccctgagcatttgccaagcagtccagtggctgcgcgtgggcctgcctttcctcccccactttggcatggctgtctcccaggaaacggggaattttccctcattcccatcattagggtgccagggcaaacaaacagtctaatccagatgagccctgggccacaatcacactctctttgggggttttctcttcacttggagcaatgttgagaaggctggagtaattggtattccacccaggttaatagaactgctgcctcctcggtattatgccttaatttcctttatcgctcagcaagttggaattcatcgcccctttcctttctttttcccaccgaaacctatcaccagcctgtctgctgggtaaagtcatttcatggcagctcttggctcctttccacttccctgggagtctttctgaccgagccaaagaacaaggaggggtgaaaaatccatttgtacaaagtggggatctcctgttgagagcttatttccctccccgttcaagaggaaggaacgtgttcagcctccagccagcacggctgactgagtcccctgtcgctgagagcattcaagagggcgaatggccatatgtcagcggtgggaacagaggattccagcactggtgggggttgggggaaaggggcaggcctttgccactcctggtgcctggattagattagaagcttctagggttttgttctgtttgtgagtctaagatttgtgatttaaaactggaaagattctgtggctccttggtcctaacgttcaacggaatgagcctaagtacttgtaaattgtgtgttttacgattctcagatcctgagacagggagattctgttctgtgattcgaagactatcttatgattcctccagtctcttcagcggcagttttgttcctgactgggtcttgggaggagtgcaattgctttgctgaggttgccatgggagcgcgaggctgctgtggccccttttctcatgtatgaaatccaagggctgggccacatggccctggggcccaggtgtgttcagcctgcagcccccttggctccaccagagcctcccacaggccctgtgaggactggctgctccccaccacctcactggacccagatgcttttccagctaagccatgccccttgcctgtctgcccccggccctctcccattcgaacggggaggcaacccagctctccccaaagtccctgtaggaaagctggagcagtgggggagtggtggtggtaagaaataagccgcatgattgacaagagctctacctgcttttgtggtgatgtgcaatttcaccatgaatttcaacattacaacctctcttaattcccaccctctgaggtggttagccccattttattgttgaggaagctgaggctctgagaggttaagtcactcacctataatcatacaggttgttcccaggccctgactctggatcacctgctgtagtacggctctaggccgcctgggcagcatgatgaaactgtctctacaacaaaaatccaaaaaaaaaaaaaaattagctgggtgtggtggtgcacgcctgcagtcccagctacttgggaagctggggtgtgaggatggcttgagcctgcaaggttgaggctgcagtgagctgaaatactactgcactccagcctggccaacagggaaaccctgtctccaaaaaaaaaaaaaaggcattgattggcccaaggtcatatggcttgaggcaggaccagaacccaggtcatctcattcctaatgcagtgcaagcaaaggaaaaagcgagaggtggacattcatcatagagtctatagccaaactgaggaacaaaaaccctgggtgtaacagccacaacccagaacaaaaggagatgggtcttggttagactccggggtggtgacgtcactcatctcccctctctgggcctcagtgccccggctgtaaaacaaggacaccgaccttggtggtctccaagcccacatcatgttaggttccggtctaacgtgagcccgaggctgggaatctgcttgttgggtgggggttgtggaccacacgcttacacctccctgttggaaccaatcctggggcggttaaagagcttcagagaatggaccccatttccttccaaacgcactgagaagccagaagcagccttctccatctgctttcagaatccaccttttccttctggatcaaacatagttcctcggggcaggcttcctcagcccctactactgccagccaaaatcaccccctttctttgaggaccagcttaaaatgtctctcttccaggcagtgagccctccccaggcctgcctcctctccctccagcagaccttactcacaggcaagggagatgcaggcttggagaccaccaaggtcagtgtccttgttttacagctgaggcactggggtccagagaggggagatgagtgacgtcaccaccccagagtctaaccaagacgcatctccttttgttctgggttgtggctgttacacctggggttctcctttcctcagtttggctatagactctctgaaggaaggtccacctctcactttttcctttgcttgcacagcattcgggatgaaacaacctgcgttctggtcctgcctcaagctacatgaccttgggacaatcaatgcctttttttttttttaagacagggtttccctctgttgcccaggctggagtgcagtagcatgatcatggctcactgcagcctcaacctcccgggctcaagccagccgaccaccccagcctcccaagtagctgggactgcagatgtgtaccaccatgcccagctaattttttttggtatttttgttgttgtagagatggggtttcaccatgttgtccaggctggtattgaactcctgggctcaagtaatctgcctgccttggcctcccaaatttctggcattacaggcgtgcgccaccatgcctggccagttcatgccttttaaggtctttgcttcctaatctcttaaagtgggtggtggcttctgcctcacacccacctcacagctgccctgaggagccaggccgagggactggggatggagtctcaaacctgtcactcaactccatacccgctaaggacccagggccagtctgctagatttctcttgggctcagggagtatcccaatcagacaattcccttgttccccaatgcccccatgatccccacctctgagccgaaggttctcaggagcccctggcttcagggcccttccactctctccattgagcacctgccctgagccacgtgctctgctgtccgcatcacccagcagcacacctgtctcccctcccggagcgggtgctgactacactggcccacaccactccaccccaccccccacacctcgagcaccctccttctgtccctttcactctcaccttgtgaggtaacccaggcaggcctttgaatggtacacatgaaaacctgactcctccaatgtctaggtgaggaggctgaggcaccagagggtaaggggcatgtccaatgtcaccccagaggtcaagggcagcctggaggggtagccagggctcccgaggcccaaactactgagacggtctggaacccaggcagggctttgtggaactccccagagaagccctgtgaagggctttctcacaccgagggcccagctttcactaggagactgggaagggtttgcatctccctgagccctgctttatgacagtggccgagccacgtgtcactggcttactgagctgctgggatgacttctgagcctagtccggtctggtggatggctcctgaggtctcccctggccagtggggccgcagatcttcatctcagcactgacggccagggtgggcacagcctggaaggggcttcccgtaggcactgcctgggtcggtctgccaaaatacagcagcaaaataagcaccccatggagactcgagcttgctaacgtcctacctttggtgttgtgggccctggctggccctgggctgggatccactcatttctgctctgtcagaggtgggggcatttggatgggggcattgtcagacaccatgaacagctgatgcttgagctggccatcaggggtgggagagttttgcccatggaggtggaagaagggcttctggcctgggggagctgcgtgagcaaaagcacctggtatgaaggccaatggcttgtccataaccattgagtggttactggaggcaggtgatggccagggatgggccagagcagtagcagggcaggttgaactgttcctgagtgccctgctaaggcagttggtcatattcaaggggagatgggaagccagcaggcaaggaaagatggctctttgattacggagaggactttggtaggacagtgactactggctctggatttgtagcccctggagccacaggagtggactgtaagggactggggaccaagccacagttccctccctctgtcagcccactctgggcctggtggtgggtaaaaccatacctaaaaaggagaggaacttagagcttatctcatccaactcaccatgccatgaaagaagagagcaaggcacagagaaggccagagacttacatcaaggccacagagcagagccaggccctccaggccaggagtggcagacggcccattgctaactccattctcagtgagatattcttaacctctctccagaaaagccagcagactccctgcacaggcctcagcgatatcacagagtgatactttaacctgcagaccttctgctgggcacacaggtgggcacaggtgggcagaggctccctggatgaccaatgtgaggctgggggtggcagagagctcacaccagcctcctgggcacagcctgccacacactccctggtgaggagcccagagcccagcacagaggagcactccagagaggcagcagtcccacaccaggagatggatttcccaataacaggtgctgcccatttatcaccgggatgggccagtgaggctcctgctaggaaatgcttctcctaccagcctaattggtgaaagcatttgcgtttttcactagccagggctgcttcctagtgtgtgcagtctctacctggtgggcagaggagagggtgctgcagcgacccactgctgacatcagaggcctgagtgccctgcctgcctgtgggtagcagccagggacccgccacccctccccacacaggcaggggtcatcactgaatcatttgctccacacaggcagaggtcatcactcaatcattcgctccacacaggcaggggtcatcactcaatcattcgctccaccagaggagtgtctgcgcctcgtgggttcttgaatccctcgggcctggcctccttggccctggctgcagagttctgctctgggagccctgagcttcccacttacagttagtgggggccgagagcccagagaggcctgccccttgtcacacagcgtgttggtggcagagcagggctggaatgagatctagaaccttctcctcaactgcaaaagaagaagcggaagagctgcccctccttccctcagagggctggtggcaagaacagggcctggaatgcaggggtccttggcaagctccaaggtcagcctgcccaagggaggcggagctgtggacccatcagccccagggggcctggctggggttagccaggaaggtgccctggtcagaggaggccacgtttccactggggtaggagtggaaggggaatgtgaggctgggagcctggcaatgactctggctggagggcctaaagggtctcctggccttgccttctggcctctggaagcttctactttaagaatgtcatgagttttcttctagctgtttctctggaacccacaatcccagtgccaaaacccagggtggggctggctggagcctgggagagggcaggaacgtggtcatcttctcagcgtgctgcctgctctcagcagcaccccttgcgtaatgcttggtccctttgcaggcgccagccagggactcctgctgatcccatcctgcccacctctcccccatacccacctcctcccagcccctcagctgtcactcgttcaatacctcctgcaaccacaaatcactgggacaggaagacgcctttgtcggtctgtccctcggagacgctcttcttccctgtggtgacagggaggcctacataccccagcaagggcttgggcctcccttggtgacagtggggccagggtccggcagtatctgagagcagctgggatgtactggggcctggaggaggtgcttggttgtgggaagccccagatgacctctttggaaggacttggaacagcaccaagatccacaacccctccgtgtgacggggtcactaatccagaaggtcagctggagggggcccttagagatgtgttcacctgaggaaactgaggcccagaatgggaaggggtgacactccttccaccgctgggggccctgctgctgcctcccattttgtctttcctcgggcctcctgatctttgcaacctcattttcatgccttggtgttttggggcaaaggtggaccacttgtttcatgtttggaccacttgtttcttgggaaataaatagatttatggtcttaggatctggcttggttagaattgtgtaactccttagtggaatgggttggaggagagaacccagaaaattttgagggaaactcttcccgatttgaaagcaaagccgccctcaccaaaaagtgctccttccgctgcagcctcttcattccgaatggggtgaatcctttggctggagcccttcgtgtgtctccctcctcctcagcacctgcagcttctcagtctccccaggtgggatgggaaggtgggggagagggcgaatttagatgtcgcctgctgatggatgatggtggcttgagccccagagcccgctgggcagtacaaagccacgcaccgagtcccgcccaccacacgcgggtgctggctcctgcaccctactgtcaggacactgtgggaaccgttcgccttctgggaaccgccgagccttgagtagtcagagactgtccgcatgtggacttctggactcagataaacagttcctttcagggaaggcatcagaggctgccatccgcagcttatcgacatctccgactctggcggtagctgtcatggagtcttgtcacaggggcttagggtgcaaatcagagtgttacagccttagaaccgtaggtccctagagtgtcagaagcagagccatgtggaagctgtttgcaatgttataatggacccacgggatctttaaactgagggctttaggaacatcacatgtccagggaggggttaggatttgaatccattgctgctggaccccagatctgctggcgatggaggatttgaatccagtgctgctggaccccagatctgctggcgatgggctctgggcatcacccccaccaccacttccaaccgtgcagctccattttaatctgtcttatatgttgggggttcacttgggaaaagggttcctctgcttaaaaatagttttccaggccctgtgctgagccccagctccatgccaggacccgccacagcctgagagggtggctctggtagtgggacggccgtcaggccagggcccccgggtggggtgcaggttgctctgggccacggtctcctccccctctcattactgctctgtcgttgctgcagccagagaacactctgggtctgtcatcctgttgactggggtgacagtttaatagtagcttcctggactgtcatttaaatctgcctgccaggttagtaggccaggggcgggctggcacgccccctgcccccaccccggatctgcattctgctggaagcggtcgtcttggcaacgctggggcatggcgagctctgtcgaagggtaactgttggtgggagcagccctttcatctccccgacccgggtacaagtggcccaactgccttagggccagagccaggccaccctgtgctggcccaggcctgggagaggaagtgggaacatccaagtcccttctgtgcacccagctctccaagttaggggctttacctttgctctcagcctctcaactgccctaggaggggaaagaacctgccccagcttgctgaacaacaatgttgagctggaatccacctttcttaggggtcgctgctctgccttcagagaacattctctagagcccaagacctgtccacagaaaccagagatcagtcagagcctgtaaggctgacagctccctcatctccctgtcctaggtggctgggtatcaattctctctgttctttccagggcctttctctagacgtgtccctgctctgaggattggggtctccagtggggtccctgcagcttcactctgggctccatgctctgtgaacactttgttctattttttatggcctagtggggctggcccagagacagacggctaagtacaactaccaggctgctgtgtcaacacgggctagtccctcccttctctgcacctcatctaatcatctgtaggatgagaggcttgtgccccagcagtgttttcctaggtgtggttcattggaccacttgtttcttgggaaataaacagatgtggcatctgaaaaaggagttccttggttaaacaagcttggaaggctggaggaaaccgtcaatcagatatctttactgcagtccttcccagggcctttataaaccgtgggcatcatgcatctccaagggggaaaataataagtgtctatcccaaatatcctggtgcatggccacccctgggctctgtcctgccccctacccctcccctcctctgctaagggccgattttctgtcttgcatggcctcacgaaatcccaaaggaagctctggcagcctggagccctgggtttttttggctgctggagagcagccctgtgtttagcaagaggctggatgggtccctgggcaagctcaaggaaagccaggcccctgtgctgggcctctgcagggcagctttgtgcacaacttggtgaacaactccaccagggtcaattgttccctggcctggtggagctccaggtcccttgccacttgccttgtccccagcccctaatggtcactctgctcgctcctccatgcccctaagccccattatccttcctcctggaatgctcttccctgctctcttcactcccacagcttggctgactcctcttccttgaacacagtgcccctcctctgggaagccttccctgacccctgggccaggtcaggtggccctcgcctggcttgctggctacaaagtgggattgggagtcattacctgggttcaagtgcagccctcccacagacatgtgctgtggctttgagcagtcacttctcactaggccttggcttccaggcatgtaacatgggagacccacgtagggggcctcaagaccctggagtccaacacggcaggacattcggattgccaagaggaagctgcacagagcagtgcccctgggcagcccggactaatctttattttggagccttctctctgcaccggggctccacgatgcgtgtgggtggggagcagcatgggaaggatgtatactgtctcagggaaggatgtctctggaggcgggggaagccaagaagtgctgagtgattctaacagtttcacaggatcacagacactgagtgtggagagggccttaagacttagtcagcgccacacctccatttcctgatgaggaggaggcaagctcagaaggtttgacggatgggcccagtgttacacacacggcagctggggccagggctgtgacttcacacacctctaacttgcacctttttgcttctcagttcataaagccctggggccatccttagcttatttgcttctcacaatgaccctgtgtgtcccgtgaagcagacgaagaaagtgcggctcacaggagtcctgtaacttgtgtaaggtcacatagcctacaagtggcagggcgcagtttgatagaccatggactgtctggcactttccttggcccgtgttcttgttataaatagcatttcccacttcctttgtcctggatttcccactctcccctactctaccctggggtcagcccctcctcactgcccctagaatcccctagtcctttgtggcagcccatctgttgccatggcaccagattatgatgtcgcagaccctggttgactatgtatcactcctgggctgagggactcacagaggtgggcattgtccaaggggcagactggcatggggggacataaatccctggaaacagggagccatggccttgagcccagctggggaatcaccctgggaaccagagccaaggccagcagagtaggggtctggcatggctttctctgacagccttagaatggcggcacagccctcatctcatggcagggctgatatggtctcttcacgagggactattgggctcattgcactgaacggcctgacactgggtgttcaccaggatcccccagaagagtctttttgccttttgtccttgtgacaaagctgcatgggaaagccacatccccacttgcccaggttcaccccgaggtggctatgccaggagtcagtctccactctgactccagatccttccatatggtcacacttccaatggggccctccagcgtgctttagtctagtccccaccctgaaagtgctgtccattagcagagcaaaagccgtcccaggcctgggtttattctgctgcacacttctgggcacattccaggagacctgagagatgtttcagtacatttgaggactctctggggtcctcattcttagcctggtaacactgaggtggctgagggtctgagtggaaagagatcaagctttggcagctgccacacacagttgaaatcacacttctgccacctaacacccttacctctaagccttaatttcctcttctgtacaatgggattaataacaacagctaccaagatagctgtgaggagtcactgggatattgggtgaaaggtgccaggccagagccagagtggaaaatctccaagctggtccagccagtgaacaaatctgttcccaaaaacaccaccgaatctgttgccaaaaacaccactctccctgcagctgccatttcctgggcggggctgacctcaaagctgccctttgggacagcagtggtgtttttggctgctctggcctccttgcccagtgcctgccagggcttggcacatggaggaggacaagatcacccccaggctttcagaatcccagggagggcagggtttttggggggtatctggttgtcctgtgcccagcaacagagccccatcatcaccttcttcaagcctgccctgctgttttgggcactgtctgaccacacatccttgccagacttgcctacttgctcttaattcccagagactgggctgggctgattctgtgttctcagtgcagaacgtagaacagaagcaaggttcattgaatgtggaactgaagcttgcacagggctttcccacctgctgtaaggtttttcttccacatttggtactgctgaatgtttgactggggagccgtggtggagatgagcaggcatctgactgtgggttcagactgtgaccctgctccccccagctgtgaccttggacatgtaacttaacatctctgggtctggatttcctcatatgtcaaatgagtacatagcaggccccctgccatgaggtttcttgggtaaaaacacctggcagagactggcacagaggaagcacctagtgagtgttagaacgagaaaaagagaaaactaggatatacgtttctttttttggatgctgagcttcttgtggggggaaaaccactggtgttcacattaggaaattccccaggtgctgtggttcatattggtacttactttaagatgattatggactatgatttaccaataggtggtattcgcatctatcattgacgatgacctctcagtgcaggaaacagggagggcctctccagagccctgggctgagaggcaggagagctgttcttatccctgccatgctgtatttccctcagccagcccctttccctttctgggcctcaatctacccatctgaaggtggactctgattcctcaggtttcttctagttctgcacgtacagaggcattcttctaagcaaagtgtgaagaaaactcatcttagaatgcagatgtactgcaaagattccactgagaaggacagacatggaacagattcagagacacagtctctctcaccaaatccttgccaggctccccagaggagggggagcaggcctgcagccccagaagcacccagagggcctgtgggtagatttgaataaaggtggtccatgggagtggcttcccagggagaaggcaagccccagaactgtaagtatggagcagaggctggggggctgtgctcgcatttagctcagtgtcccgcactgagacctaccccaagctggattcttgctgaatttgacagtctctgtgctgcagggacagggaagaaagcaaaccatgttggactcgcaatcagtgatgatctagagcagaggtcatcaaaatacaggccacaggcctggcctgtcaccagttttttgtaaataaagttttattgaaacataaccatgctcactcatttatctaatgtctctgactgcttctgccccatagtggcaggattgagtggtgtgaccgagaccatttggccctcaaagcctaaatagctactatctggcccttcacagaaaaagtttgccaacctctgccctagaaggacattcaggggattgtaggagctcaggagaggctactgatcaagactggaggtgatacttaagcccagtgtgtaatggaaagaaggtgagaggtgggggaaggggctttcagactaaagacagcttgggcaaggtatgatggtataaaaagcatggagtatatgaggacccaccggcagttgaggtggggctagattgggaagtatgaggaggggaagatgagggagcggggcaggctggggccacgggacttctaagcccctggggagaggccacatcctagtggcccctgatgttaaatccatcccaagctcattccaggggaggactttggtggtctgagcgccccaaggcctggggtaagtcactgctgtgctgaggtatcctcttttaggctgaaaagagacccccctgccgtcttcatttctgggcctcctggtctcgaactaccacacctgaaagcttatctctcaccagatcaccctctcttttcctgatgaagaagctgtaggccagaaaagggccatgatgtgcttgaggatacagagcaaaatagcacagcagtgtctcaaatccagacctccggactccctgcccagtgctctcttcctcaccttgttctgtagcgggtcctggatgcttggtccagcaggaacagggcatgtgtgagttcaatgcagatttgatgcagatgagcccccaataattcagaggcctagggctgctacagagggtgcaggatgtcaggggtggagcgctcaaggccccttcccggtctccaacacccccgcacccccaccacctactgggggtagccaggcagcctcagttcccccatggaagtcctgacagggcaactgctctcccccgggcctgctaggtgcgcccagtgctgtgctgctgcttgggaagaagctggggcaccttatgacatgggcatccatctctgtttcctctcattgatctggaaactctagttcctcgtaggacaagacacagaaggcagtaaagaaccgggctggggatggtacctgcattcttatctcagctccgtaaccagctgtgagctctcagcctgctacatcccctgtgtggacacagaaccccattccttcagcttctaattaagactcaaaccctgaaaacaacagtagctgccacttctccagcatctgccatgtgcctgagtctgctgcaggttcttcatacattacgacttcttgttgctcctcctcaccgccttttgtcttcttctccctattatatagataagaaaatgtaggctcagagattaaggaacatcctcaaggtcacacagataggaggaggaggaggaggaggaagtgggattgagatccccagagcagtgtggaggtcaccctgcaggctgtaggcaccggggggcagggactgatttgggtgtcttgcccagtagatcctcttccgactgctctgaacacaaaatacgtcattcatcttgccacaaaggaatcatctatgtgtaggattcatgatcacaaactcccctggcgcctgcagaagggactttgacttccagtccagttggggaaagtgggacaggcaggtaaagagactgagaactggctgaaggagctaaggcagctgctgtagggtatcagggaaggcttcctggggacagtggcagtggaactagacattgaggggaagcaggagtgtggtggggtatgataaatcttgtcatgcttgctgggtttgagctcttggacttggagggcagagcagaatgtcacctgtcttcacgcagtgttcagatgcctaaggaatgaagaagcttgtctctcctgtcctctgcccttggtcagcaaggcagtccatggcctggtttgcagaccaagcacatcctggtcggcccaccaccctcctgactgctcccaggctcaccacgctctcttccttgccctgcagccaagaagacctgtgcagacagtgacttcacctgtgacaacggccactgcatccacgaacggtggaagtgtgacggcgaggaggagtgtcctgatggctccgatgagtccgaggccacttgcagtgagtcctgcccctcagtctgggtgggggtgggcctcagtttcctcctcagatcttccttgagaggctgtgaggctcaggagaggtaaccagttgaacattctgtgccacgcactcagggcgctcctggtaaacagatatatttagttgctggtttctactgacctgtttctggactttcttcacagccctcttgtaggttggaccctgtttctgtggcagcaggagctagaaacagccctgtcaagcccttctgcccagaaggagccctagcgtgtcctccaggcctccctgctgctgttcttgaggaccccgaccataattccaggagtgccagtggcagctggtgcttcttaagcctttatcgtgtgctaagctctctgtgtgcattaatgcctttgataaccacagcagcctcatgaagcagatactgtcattttctgagttttgtaacggagaacactgaagctcaaagaggttgagtgacttgcccaaggctacccagccaagactttgaggctctggcccgttcctctaccctgggtgggctgagcctaggagctcctgcctccatggccagctgggtggtagcagaggcaggcagggggaggtagaggccagagctgagccccaggcctgccccctacactcagggctttgtctctccatgatttattttccaggccctaatcctcaaagcaaacttacacccggcaggtcattctgtgacatttgttaaattaaaaaggagatgagaagggggcggggaaggacccagcagtccagaggcagagcttcagcagcgtgagcccgagacaaaaggctcaggcaaaagcatgtggaggatagtggggctggcggggacccaggagcccctgtttaggggtaacagtcgtcccagaggcagaggtggggacaatggagaccggagtcccatctaacgccgtggctggtgataactgggtttccttgtctcctagcaacagagctaccagtctccacataagagaaagagaaagggagagagagagaacagagcaagagcggcccccacccgagacaaggagccctcatttcctcgtacagctgctcctggcctccccagccatgccgcaggccccatcctttccttacccaccacgtggccaaactccatgccgtcctgaaggctcccaggcaggagggaagcccagtgctttgtcctgagcttcagaaggaacaaagccctgccacgcccacttgtgactttcatcctcttggcaacctaaggaaggaggaggatccccatgtagagagaaagaaactgaggctggagtcagttctcccccttgcccaaggctgcccagctaacaagaggcagagtcgtgtgcagcctggagtgtgtgcttggggagggtttgtggccacagggagcttttccctcactgcagtcagccagctcctccatccgtacctcactccagcagatactccgacaatgggggcagaaagggaagggagaggagcctcatcgtggttatcagagggggctgccttgctacctgagggctaggctccccttctccccctgccccacccccacccccgtctctatctctttgtgtggatgtcccttttcatcttccattctgtccccttcggggtcccgcccacccctgccctcttgggctgcctcccttccctgctcatctcctatcctcaccctccctctcaccatctcttctcactgccctactcatgtgtccctctgtctttttccctcttgcccatcccagcacctgctgccttcccatcccctgggctgggcaggggccctcctgcctcattcctcctgcctcccaggcccgcttttcacagttgagggacaacaggaggcccagagaagttgatagacttccttcaaaaacacacagcttatccatggcaggtctcccttttatgaaaaaaggctcttcgagctctctgaggtttcataaggcgtctatgggagcagtagccaaggcagcaccccaggagacagaagcccagctctcctgtgggctcttccagctactcactgtgaagccctgcatatcttcccacctccctctgggccctgatcagtaacactccggaattccagaatcttctccattcctagattcctaaactcttagtattctgagaccccctttcccccttgcttgtgctagctggggtgcaagagccatgatacccacttcctgtgttacattggtcggtgtaggcaaggcggaagactgcctggaggaagttggctagagtgggagctctggtcagggtcaggcagaatttggggcagcaggacctgatagcaggcttgctcactgcttcccaactgaatgagaacctagcagccaacctgctatccatttaattggtgttgccatagcaacctccacggcccaccaggttcctggggctatgccagctcccaggatggagccccattccctacccctaaaagaaagattataggcagtaaagtgtagtgagtttgggattggatatagttgggttcaggtcttttaacctgttagacctcgggcaagctgcccagtcatcctgaacctcagtttactcatctgtaaaatgtggtaatggtacctgccttagagggattgtgagaatcaaatgaaagaatgcaagtatcatcgctggagtaaatggcagtgttatttgtattattatattttggctgcaagccccctctccccaacacaacagtgtgttagatattaagatgttagattcttacagtgttaaaatagtgtcagtgaagggagttgcattgagcgggaaagggatttgagagaaggtcccaattcttgtgttttccccgattatgttgtctgtccctagctggctggggtttctcccagctctgtttccctctggttctgtgttctgtacctatcaaatgtagccaggagtcacaatggaaaagcccagaacatttgcctaatggcaatagcatttcagctctaattatagctcacttgattggggacggcttctgacccaccttcaggcttctgttgggaggggtgagggtgggggaggggaggatggttcaaggtgagttatagttctggatgctatttatttgaatatggaggctttttcatgcatcttagaacctttccacctgggaggggggcctctctgattaaccaggctcatcttgctattatagatcagaaaatggaggcccagagattttctgagctcactcagtaagttagggactgacccagctagcagcattttgcctggccttgactgaaggaacttggtgtaactcccccttctgcaccttgggtggccccatgctgtgcttcctgtggattgagtgacactggcagttctcaccaccggagcctctggtcccttagagctggcagtccccatttggaggttatctgcccctgaaactcacgtgggttgacactgtagatgcgttccctcaatgggcagccgccaagtactttcattctttaacagacattgcccttttcgttaatttgtgaatttatgaattggagaaagtaccaatggatttgaatttctggggcaggattctctgggaatttaaatgcctttaaatgccgtgagccactccaggatacagagtttcatgaaaagcccccttgccagctttggagggttcctgttgtctgagagacagtgggattcttcactcctgcctctcagaacctagggtacttggagagcaggccaaaggcatatggtcccctccgggggcatctgtcacagagggagtggctgtcctgggatggggtctgcatcgcggtggaccatgtggacttataatgtgcattccccagtggtgacaacaggcacgtccccagccattggcatttgcacttcatgaaataaaacaagggcaagtgttttctgagctcctagtttgttccaggctctgagtgtagggatttccatatggttccccttttaagccatccaccaaccctaggagattattcaaccccattttcagatgaggggagccagagtgcagagaggttcagtagttgcctaaggaccttagttttagtaaatgaaacttggatccaggtctgtctgactctaaaacccaggctctttctcctacatcatgctgctgggggcccttgggcttcagttatcctgagagtggacatcagatggccatcgtgcagaacctgcccaaaggctcagtgagtccccttcctccagtgacctctctctgggccagtggtgccagggagaccaacagggtctgcttgattctcttgtgcagtggttaggtgcagtaagttaagcactgtgtttggacctgggatggaagtccagatctgcctctcaccactagcctttgaacaaacaacttactctttctgggctttactttcttcattcataaaatggaggtaagaatatccacttcatagggtgataccatgtgtcagtcattacccagaccaacttcccaggactgtggagtagagaggcctgacctgggaccctgcgagccaggctcaagtcctacctttgggggaaagctacatcacaggagagacagtgaggttccaggagagacaggaattggaatacccaactgccagtagctgtgtgaccctaggcaggtcccttttgctctctgggccttggtctcctgccactccaagggatgttcatcagtgtgacctctgagatctctcaagtcctggcattccaagagccttggctctttgagggtggagggctgttatcaggcactgctgaatccttgagaacctataattagagctgtctatttagggacacagcaaatgtcttattaattataaagaaaggaagcagacagattgtttaatcattgtccttgctgaaaggttatgcaattaactatataaatattcattaaaagttcaagcagccgcttgctgcactggggtctgtagaacctggaggtccaccctggaggtggagcgtacagccaagggccctttctgtcacctgggcttttgtgaggagagtttggggatggttctggagcatgcaggatttgatggaagggcaaggctctagtcataggaacccaggctcggtctctcgcctgctgtgcatctttgggctagttacttggtctctctgagcctcagtttcctcatctataaaatggagtgcttacgtgcaggactgctgccctgctgtagtgcagtaagtggcccaggtatgtagtaagtaagtggcccaggtatgtagtaagtaagtggcccgggtatgtagtaagtaagtggcccgggtatgtagtaggtaagtggcccgggtatgtagtaggtaagtaagcggcccgggtatgtagtaggtaagtaagcggcccgggtatgtagtaggtaagtaagcggcccgggtatgtagtaggtaagtaagcggcccgggtatgtagtaggtaagtaagcggcccgggtatgtagtaggtaagtaagcggcccgggtatgtagtaggtaagtaagcggcccgggtatgtagtaggtaagtaagcggcccgggtatgtagtaggtaagtaagcggcccgggtatgtagtaggtaagtaagcggcccgggtatgtagtaggtaagtaagcggcccgggtatgtagtaggtaagtaagcggcccgggtatgtagtaggtaagtaagcggcccgggtatgtagtaggtaagtaagcggcccgggtatgtagtaggtaagtaagcggcccgggtatgtagtaggtaagtaagcggcccgggtatgtagtaggtaaggcccgggtatgtagtaagtaagtggcccgggtatgtagtaagtaagtaagtggcccgggtatgtagtaagtaagtggcccgggtatgtagtaagtaagtggcccgggtatgtagtaagtaagtaagtggcccgggtatgtagtaagtaagtggcccgggtatgtagtaagtaagtggcccgggtatgtagtaagtaagtaagtggcccgggtatgtagtaagtaagtggcccgggtatgtagtaagtaagtaagtggcccgggtatgtagtaagtaagtggcccgggtatgtagtaagtaagtggcccgggtatgtagtaagtaagtggcccgggtatgccacttatgtgatgacctttgtgaatggcacccccggaatttgcactggcagcccgcaaggcctgcttaccttacaacagacatttgttgctcacagttctggagggtaggaagtccaagatcaaggcaccggcagtttccgtgtctggtgagggcccgttcctcatagactgcacctccttgcttcatcctcacgtggtggaaggggcaaggaggctccccctgacctcttttgtaagagtactgatctcattaaagagagctgtactgttatggcttaatcacctcctaaaggcctcacctcttaatgctatcacattgaggattaagttccaacatggattttcaggggataccaacgttcagaccatggcagaatgaaatgaaaaaatataaaattttcagcacagagcagcctgacacaacttaggtgttcaaaaactgggactcccctccccctcccttgagaggttctgtttcctgaggcctggcttagggataagtagttgctttgaccttccatcccattgctctcttaggggcttgcaagtgtatggaacatctgtatcacttttatcgtagtgaattgaaaagagatgaaacatcccttgtcttctatgcttgcagaatgttaaccaacccaggggttcccaaatagaggtgcatgggaatcccctgggttttggtggggagttactaaaatgcagatccctaggctctgccctagaagtctagattcagtcagtatgagctgaggctcaggaacctgcactttgagtagctccctcaccccccaccctttgatgagaggaccccagcaaagcactggtcagcttcagcttcctgtgttccagtggggcccagaggggaggtgcttacctggggtcctgcagtgttggtgatagaggtaccctggaaggaccccatctcccaactcccagtttcccttcaccaccctgcactgcagccccaaggtggccttatataaaaggcctttgagggttagtactttccagagctcaacctgacagttatttgctcatccatcccacaagtctgccaatcctcgagcaagggaaatttctgtgaaatgaataccaggaatcctgtattcccaagggattgccctgtactcatgaaatgcattcctagggataacgttggggacctcactttcaggggcctaagatgctcttctcccatggcagtagtggtgtccagggaccttgactcagatacctgctcccctccccaactcatctgtgcccttttctgtatcccttgtggtctctcatcccagctatagaaatgggaagaggagaaactggtctgagatcagagagcaaaatggagggcgaagcatgagtagcccactgcctccggggagaaatggattgtgctgagtctccggcatcagacacagctgactttcagtcaatcctaacactgctctttatcagctctgtgaccagaacttagtgcctaccaccatgtttgtcacacagcagtgctcaaatactcagtgaataagcaaaattcagagtcatctggtatgtgtggataatcatagtaggtaacatttagtgagcactgggctgggtgttcttctaggtgcttgctttacagacattaacttagtcatcataacaatcctatgagagatagtattatccccactttattggcacagagataaggattgttggccaaggtcacatagtcagtgagtgattgaagtaggatttgaacccaggcagccaggctccagagcccatgttctccgcctctatgctggaggccagcacataatcctctcaccctgctggcttattgtgaaaattagatggaagtgtctagcaccatgcctggcacatcctagagaccacggaggtcgggcctcctgcacaccctggaaggctgaagggagccaaccacggaggtctgagatgcatctgccttggctgagcctgtcacatgggtccagcagaaactcatgataagagctgtccccagccttgaatagggttctcattcttccttccaaattgagattcaaccctggggcttcaggcccctgattgagtcagcctctgattgcggctgcagtaattatagctatgcagtcccgctgggccctgccatgcagcagctgctctcagcagcaggatcagcaccatcactcggggagggggcttagaggcgggccgattggagccgttggggccttggtgagccctccaaatttacaggttccaatcatggagtcactgatctggaaggcaaactgaggcccagctggggcatatctcacctaagggcacacagctgggaaatggcagagaagagtgcagggcatggtggctccatgttgccagaacttaaagtggaggtttggagggatgggaggtgtggccaggaggggcaggcagaagtcaatggatcaaagggacttgagggccagggaccagggggccatgaaagatgttatgtagagaagggtcagatttaggatttgaaaattcctggcacagacagaggcttcttctcagctgatgaaactgagacatgggccagaagagccctgatggactcctagggccttggaccagatggctggaacagggtggtaggactggttggcaccatgccctgtgtcccccttggctaagctatgcatggacgtctgtctccacagccaagcaggtgtgtcctgcagagaagctgagctgtggacccaccagccacaagtgtgtacctgcctcgtggcgctgcgacggggagaaggactgcgagggtggagcggatgaggccggctgtgctacctgtgagtctggggtcagatctccagggtctgccaagcatggtcaggcagcctcagggagtggcagccacttctggggagggggcccagttccccgtggggcttggtggtggagaggaaaggataacgatcaggacactagtaatggctagattctatggagacatggtcttctttcatcttcacaagcacctcatgagcagccattatcatccccattttataggtgaggaaactgaggctcagacaagggaggaaaagtacccaaggctgagtgatgaaaccaagattcagattcaggactggacagcaaagcccatgagcttttgttaccatgtctgacatctgctcatccatcccacaagtctgccaatcttggagcaagggcagggggaccagggagggtgctgcgtggagaaatggcggtggtctgagccagggcgccagcaatgctggggggagggggacggattcctgaggtgtcaaggacgactgttgctgaaatctcagattcaagcacagacgtcacagggcagagaagacattctcagcagcctcggcagggacagatggaagtggtcactgggacagttccacatcactgagcttcaaacacaggattatctccttcccagggagcaggccagcagggcctgggccattggggagcatggccaggcctcactttttcaattcgaggggcacctactgtgtgccaggcctgaagccaggctctgaaagggacagtgaggtgaatcctacacagtcttccctctgggaacacatgattagtgggggagacagactggctgtcgctactaggctgtgcggctgggctgaaatacgggcggtcaccctggagggcttgccaggcacttgcccatcactgctgcctactcccctctgccagcctctatatttgcatcctatccatctttcctggcccagggaaaatgccatctcctccagaggtgtctgagtcgtcacactttaagattctaagtctggaatttgatgtgtctgaagcaggaagcatctgggtatggagggagatcctggctgggaacagcagtttcaaagtcccagtgatggcactggctcacttcctcagctgtgataattttgctgggactcactggccaatgagaatcctctttcctctttaccaagccccataatcagatgattcctccaatatgaaggccgctactgcaagggatgggagtctctccaactagggcatgttggaataggaacattccccattaattatgggagagagaggtgtcagaaggtcttactgggcttctatgctatagcttccaccctcctaggcagaggaaagagtcctcccacccctcatctctcagagcttcttccgtttgtgagtgctaggagtagggtctctcggcctacgtaggcctgagaatatggatcttaaagttactgttggctccaaaacctcagagaaaactcagtatgaagaagcacttccttgccatccaagtcttcaagtaaaattaaaaattaaggcggggcgcggtggctcatgcctgtaatcccagcactttgggaggccgaggcaggaggatcacgaggtcaggagattgagaccatcctggctaacatggtgaaaccccacctctactaaaaatacaaaaaaaaaaaaaaaaattagccgggcgtggtggctactcaggaggctgaggcaggagaatcactggaacgcaggaggtggggttgcagtgagctgagagcacaccactgctctccagcctgggcgacagagcgagactccatctcaaaaaagaaaattaaaaaaaaaaaaaaaaaagcacttcccatcagaactcccagaaagcagtgagtccaccctccctgcacatgcacaagttgggtggggacaggcaggaagggagctcatctaggtgtcagcgtaatattgaggggcagtggcagtggcagcatgtgctttttccaccaatgccccagtgtctcaaaagcccaggaggggaaaaaaattcaactgtcagacacttggtagagctgtcagaaacgcatgacacgagctacctacctggtgaaactgaagacatcactctattttatcttcaataacaatgaaaattcacatttttccatcagaaagtgaaaacacagactctgggcgcccccacgtggaaagatctggtgctgccaccaccacctcacctttggccacagccactgcatcagtgccccaccggggcctacccccatcccggggccaggtcttggcctgtgtgtggacgcacaggagggagggaagtgaggaggtcactgccctgaaaaacagctggaaaaactccaggaagggaggagaaaaccagaaaagccaagaggaggagtcagagtaggaaagaaaagccccaaatgtgagttctggttctcttgttgtcatggactgtgtgaccctgggcaagctgctcctctctctgggcctcagtttccccatctataaactggcaatagggctggctggcctctaagttcctcccggccactgaactcagactagcctaccagagagaagcccagagccccaagcagagccatgacgtgtgtccttaattactgcacatcccataattatacctcatacctgggccagaccagttccatccactccacacccactcactacagggagctctgtaccaggccctcaggacaaaggagggacacccccaggcagtgtggattcttggggcagattgaaaaggacatgaaactcagacgcctgcgcgactgaggggctcagaaacgagggcagaggcagagatttcccaagcggggaaacgccagggtgtcatggaagaggtggaatttgggcccttggaagatgagagctcatcattgcaaaatgtagtggtgggcaagaagtaggttcccagcagatggagcaacttgagtaaaggcttggaggtgggagcctgtgcactgggcccagcaaatggtctagcatggcgggagctgcgaacattcaggagtgaggtgatggagccacaggactgacccaagagacgccttggataccaggccaggggactcaggtggaacagtgcaggttatgctatgcatcgctatgctatgaggagccaaccccagaccctggtccctgggaagggtcagtgtcatttaacagatcatgtcctgggaccatagcagggtccttcaagacaggcagtgctctaaggtttcggaatccccctcctagtcccaccatgctcatgctcatttacccagtgaggcctggggggctcacaaagggcaggtgtgttgccagtcacctagcatgtccgtgttggaagcccgccttcgctatgcctaactgcacgtccaccattcagcccccaaagggcacttgttctggcccccgggtgagggtcggagcccctgtagccggaccagcggggccccaggtcggccggggagggggtcggcgggccgaccggctctctgtcccgcgcagtgtgcgccccgcacgagttccagtgcggcaaccgctcgtgcctggccgccgtgttcgtgtgcgacggcgacgacgactgtggtgacggcagcgatgagcgcggctgtgcagacccggcctgcgggccccgcgagttccgctgcggcggcgatggcggcggcgcctgcatcccggagcgctgggtctgcgaccgccagtttgactgcgaggaccgctcggacgaggcagccgagctctgcggccgtccgggccccggggccacgtccgcgcccgccgcctgcgccaccgcctcccagttcgcctgccgcagcggcgagtgcgtgcacctgggctggcgctgcgacggcgaccgcgactgcaaagacaaatcggacgaggccgactgccgtaagccccctccataccgcccagccccgcccagggattgcggatccgctatccgatccggatccgccaggtgcaggcttcctttcattgccttacctgaatacattacccgggtttactacagaggagaccgaggctgggagaagtgaggtgacttatttgaattcacgcagctgccgggctgcggagctcaggtctaactccagaagcctccactggtatctgtgtccctgctgtgagccctcccagtcgtacttcccacccccatcccccgaacccctccacccagaaacctggcaggctcaggagctccccccatctctttacccgctaggcctgctcattcctcaaggcctggcctagactcctctgaccttcccagctgggctgggtccctctgctgggcaggtccccagcagctttctcttatagctcatctcacactgatgtccccatctgagcattcctcacccttgctctgcaccctgagctcctagaggatgaggaggctcttaggagtctctgggctcccacccccacctccacctctcccagcacagcacctggcacaggaaggtttgccaaatggatgaagtcattaagtaatgagcaccaagactcaaaagaaggccgtgtgtctgttctgaggagtggccctggagagaggcagggacagggaaacaggagatctgggtttagtcctgaatctgccagccagagtgctgtgtgaccctgggcaaggccttccccctctctgagcttcagtctccccatctgtacactgaggtgccttggccaggtgtcctttgaggactcctgagttcagccactggttctgtttttgctgggggtggctatggcatggggattggggtggtggggaaattgtcctagcaccacactgactctgatcctctccccttgccctctcctggcagcactgggcacctgccgtggggacgagttccagtgtggggatgggacatgtgtccttgcaatcaagcactgcaaccaggagcaggactgtccagatgggagtgatgaagctggctgcctacagggtgcgtgtggtcagggcacagaacacatcctctgtgaggatgccctaggctctggtaactctccagagggcagagttgggaggagtttccccttggtccccaagatgcattttcccccagagcatcacttgcccctaaatcacctggctccctttccatggggtcctagtagcaccagaactggatttgtaaggactttgccaaagctgaaagacacctagggggacatgacagagcacttgggaagtccagcccccaccacttgtccaggtcccagctggtgagtggcttccctcactagttcccaggctgagcagaggctgagtcttgctccccagggagcccctttagttctcagatggttcttctggtcaccacctgccctctgcaggagcagggaccctcattcactagtcatcttggggaatggataacaggctgggcagtgtagcaacttcccctatccggggtccatggggcaaagtccccccaggagatgatcagtccagcctctaaggtctctctagagctgctgcctggtcctcctaggacctgagtcctgcaagatgagacgcagatccccacagccctgcccagctacatgaggcttagcctcctaatcatccctgggatcctgtcctgtgagcagagcttcctcagttcctggatttacctgtctgtcctgggccaccctccagggacctgtgagggactggaactggagctctgcttgcctcctgtgggccccagcccagcccttcttgtccaaggtctcacaggcactgtccactctcttgtccggcccaacagagtcaccctgtgagggtccccgcagatttcagtgtaagagtggcaagcgcgtggacggcgggaaagtgtgtgatgtgcagagggactgccgggactggtcggatgagcttctgaaagtgtggtgcggtgcctgtctacgcccactggctggactcagtctcctaccatccccctcctggtatctaggctcaaggccctccagtgccccctgccctgacactttctgctctgaccctctctttggattcatgtgccgtcctatggcttcacatggggcttttcgcccccaggcctctggtctacatctctacaaagtgctaagagcttgtccatcccaggtactaaaaaattatgttttctctcacaaacttggcctttcctcattccttccccgttcagacctctgagaccttctggaactttctctcttcctcggtgttcctcccctgctgacccagccaaggccctgggctctgaggtcttctagccccttgcagaagacccagcagagggagaagtgggcacagcaggcaggcagccaggtgaagcacatcccagggccactgctcaggccatacctgtgtgggagtaaggcaggccttgcagcaggaggtggcaccatcctaagccctgaggagttcggacctgatggggagaccagacttggaggccagactaaagcgagacctggatggaagtggctgccctgatgtcggctacagctgtcagggtgggttccaggctagaaagaacagaggctccaggctgtaggtagggtgggcatcccagagaacatgctagaaacccagtgtggactccaggaaggttcatgagtttttttttgttttttgtttttactgttcccaggttagggcttgagggagatttgacagagaagccctgggaggacagaggctaggtcagtccctccctttcctgccttctggcagactgtttccccagcacctacctcctgggtgcttagaggaggttcatcctcctgagcttcccaggaagagcatatttccttccccttttgaagattaaaaaactgattgtgaaaggaagagtagttgagtgaaagtgactcagcttctacctgagctggcaggagatagacactccctctgcctccaggccctgccaagagaagtcccagaagaaggaacttgtggaaaaagagacagggaagccagaactactgagcctagctcccccaacacccagatttggagtagccagggactactgtcctactaatccctctcttctctctcgtcgtttgcatgacacaccaaagaggagtacgtacacacgtgcttgtgtctgtgtgtggcctctgtctctgtgttggtgagaggccggtgtctgtatccatgtcttcttctctgagtaaagcaggggaactgcattcatgcatctatgtgtgtgaccccatgtatgtgtgaatgtatctatggagtccatgggactgtttgtgctctgcacataagctggtatgtgtgcatgtagttgtgggcatgctggtgtgtgcatgtaggtgtgtgcagtgacaccacttcttccttccatggaaggaagccgcaaatactactctggcctctctgcaccactctaccccatccccctcctctcctggctccccagcggaatcacacccaggctaggtagaattaagaaggactgaagacttccctgcaggcatttggggaaaggttacagggacagacaggtgcagacctgctctcctttctcttcccctcacccacctgagccctggaggactctgtgccttccttcatcagaagccagtcactttgagttctctcctttccccttccccctttcagggccatcccacctacacatgccacttcatcaagtgctcagtaaatagaattgttgagttgttgctagctgcaaaaggagaggaaggaggcgagtggatgcatgatgggggcagtgggtgagtgggaggacagatgaatgaacggtgctcagggaataacacaggaaaggagaggtcagggagggctccgagcgactgaaagattcctagaggtgggagctgccgtggctcagcccacctccaagggtctgaggcttcccagggctgggcctggctgagtcatccctgggtcccccagtcatggagttgctgtggtcttgttctttcagttccgccaacattcctgggaaacaggaggaggcccaggggtaaaggggttattccctaagcatggctcaggctggaagtgggggcaccccatagctgtgcatggcctggggtgggcagctcagaccagctatatgcatggccatggctggctcagctcagcactgcttggcttggctggagtggcagtgcatgagcctggggggcagagggggagaggggcgcggcacctctccttggcttgtggaattaaccttctgtgactctaaagctcaggagaggctgtaagagcattggtcctggattccctgacctcccctaagaccctgccagaaggtagtgagggagtggaggatggggaaccagaaccagatgacctctgggcatcccttcacctcttgcagcaggtggtaatcctggaaccgggcccatgacaagataggaggaacagggacaggtgctgagaggagaggagttaaaaaacccatcatattagttcatgataggagagaattgatttagcaatggctccatgttaaaaaaggcccaggagtcttaaataaccacaagcacattagggggggcatcctgtgttgttcaggttccttctgggtggcaaactagctctgggccctgtccagacagggacatggacagatggagtgagtccagagaaaggcacccaaatggcaggagaccagatatcagtgctttaagggagcctgtgcaccctggccaaccccacacagcagagctgggagcacaagcagaagcctcagcaggcagtgctggtccacagtggagccagctgccccaggagggaagtgggctccctgaggctggagatatttaagcaggggcattttggaagggattcttagggtatcctgagggttggatgtgacacacacaggacccttcaactctgaggtcacgaggaaggaggcgctgtgagaaacatgtttgtgaaaggaaagaccttgggccactggggaaggcctagctgcctccagcttggtggtggacagagccccagccgggaggccggggacctaagttctggttccactctaccctgtctctgtgtctggcctggagtaggaacctgccctctctgtgccgcctgctgcccagaacacctggtagatgaggctgaggctcagtgaggttgtggagccctcctgcctctatgggagtcccactgccctgaggctctgcttctgctctaggtcctacccctgccctgcccccactcctcctgggctcctggaccttcaggagcccatgtccctccccagggctgaacgagtgtctgcacaacaatggcggctgctcacacatctgcactgacctcaagattggctttgaatgcacgtgcccagcaggcttccagctcctggaccagaagacctgtggcggtgagaccttctcccacacccccaagcagaagcagatcctcctgctggttctgactcctgctcctccccacagacattgatgagtgcaaggacccagatgcctgcagccagatctgtgtcaattacaagggctattttaagtgtgagtgctaccctggctacgagatggacctactgaccaagaactgcaaggctgctggtatgaacaccccaagggcagaggggcagctctgaaaggcatacaggaagcagcgtgcttccacttgtgaggagtgggcgtgtacatgtgcgcacacacaagaaggcaggttgtgttactgagaggtacgggaatcctcggtcccttgtctagcttgggagaaagaattcagccaagagacaattagtaacataagccgaaggtttattaaggagataagagtacaatctaagacaggagcaggctgacccagctgggagcagcagcaatagctgtgtttctttaaagggacagtgcactctgaaaggtgacgcagagtgggggcagcctgctaaaagagaatgaaccagcggcagccctaagagttctgcattgggtttttttcttgaagttcctgtctctgtcctaaatctctgccattttctttgtctagttttcccattcctgctttaagtccctgcctgttcctcacctagttcccacccaggcttgtgggacctccccttactattagcttgtgtgcatgcccagctctgggcacaaatactacctaatggtgccatcactcgttaccaccaccctaggaaggttgtatagcagtcaaatctgattgggcctgcatatttcttagggatttcccctttgcccttcccctcctcctcaacatgcagctagctacattctgatgggagaactgcagagtgagcagtttctgggcatcttaaggggcattcctttctgcagaggcatttcccctcctctctgctcatatctagcatgaatgttttgggtggtctctaggtgtgagattttctagacttcccttttctcagggactcccccttctgctcatgtccagctgtctgcctactctagcagttgcacacacagtgctcaaaagtgtacatacacatcacacacacaacgcactgcacactaacacccacacagacactgtatagagccacccaatatagcccacagagatgacactcatacaacagaatatgaaccacacagagactacacacacagcatatggagtccacacaaagagcacgacctgggcagacctacacattgatcaattcagccagcagaattaattcattgtattcagttgtttatattgaacacctaacattgtagtagacactggggattcagcagtaagcaaaacagatgcaaatccctgtctgccctcaagggactcatattctaatgggtgagccaggctagaaatcagataaatacataaaatatagtgcatggcagatggcgataagggctaaggaaaaatagaaagtagagaatgggaatagggaagtccaggtgagcagggggttctagttttaaatggaatggtcagggaagccctcactgagaaggtatttgagtaaagaaggtgaaggggggtgggtgtggtggctcacgcttgtaatcccaacactttgggaggcctaggcaggaagatcacttgaggccaggagttcaagactagtctgggcaatgtagtaagaccctatatctaaaaaaaaatttaaaaactagccaggtatagtaccatgcacctatagtcccaagctactcaggagactgaggcaggaagatcccttgagcctgggagtttgaggtcacagtgagttatgatgccactgcactccagcctgggtgacagagtgagaccttttctaaaaaaaaaaataataataataataaataaaaagggagtgagggaggtgagacagtaagctaccatgcaattatctataggaacaagcatttcaggctgaagagacagaaaccgcaaaagccctaatgcaggagcatgcctagtatgttcaaggaatagcaaggaagctggtacagttggagcaaggaaactaggaagagatgaagccagagaggtggcttggggcagcccaaagggccttctagaccattgtaagagccagctctggatttcactctaactggggggaaaccattgagggctctgagtagggaagggacatggtgtgacattttattctgactgcagtattgagaacagactgtagaggacaagggagaaggcagggaaaccacttaagaggtcattgcaataatccagaagcgaggtgatggtggctgaacccttattcccacattattactgtgggaataatgaaaagtggacagactgcagatatagtgcaaaggccagccaacaggatttgcttatgaattgaatgtggaatgtggaaaaaaaagttacagcaactgaaaaaataagattgctacgtatgggcttgggaaagatggtgagggaagcaggtttggaggaatcttaggctgttttggacatgttatgtttaagaaaactggttaggtatccaagtagagatattgagaaggcagctggatatatgagtctggagttcatatgcaagttaaatacaatatacaacagataaattataacaatacagcagccataatactgacatgtagcccataaacccaaaaactgtaacacccaaactgtacaatatgtaactcatacattagtatatcacatataacgtgtaacctgttcttgcccccatatagaacacatgtaatacatgacacagattatgtacatgcactggagacaacatgcaactacccatgcatatacaaaatccacacacatgaatatttcaagtgcagttacataaaatctcaaatcataaacacagggggttcctgtcacagtcacagctgtcatttaagatcactccaacatgcccctttaacctggctcctgccttcagggaggtgaagtgtcattactgtcattttggggtgagggaaatcacagcttgtcagtggcagagctggcctgtaactcagctttcatccttgccccttcctgcaccttgagcccattctccatgctatttgtaccacacttctgtctcactcccaccctgctttgaattagtctccatcactacacacaggtcacacacccagccccaggccctacctgactctgtgctggtcccatcctccagggagcacattagcttggcaaagatgcacagtgacagggactggtggctggcagaagtgtcagctggaaaacaagagaaggaggcacagggagcttgaggggcaggtgttactaggagcagcccctcagacagtgttggtgcctgagagtggcccaatacatctagaaacagcctgtgggagctggtgctaggccctcagaggcccatgggacagtgtcctcccatatggagtagccaggaaagtctaggtcacttatttatcatcttaaaatctaaccctaaatctaagaaaaatacaggttttgtgtatacatgagcagtttatgttgtctctactgcatatatataatctgtgttgtatatcatatatgtcccatctctgccattggctcaggatagagaacaaactcacccagctcataggaccttttgtgatctggcccctgccaatctctgaagctcatctcttgctatgtccccaatactttctatcctgaatcatctttttttttttcctttgagacagagtctctgtcactcaggctggagtgcagtggcacaatcatggctcactgcagccttaacctcccgggctcaaatgattctcccacttcagcctcctgagtagctgggactacaggcatgtgccaccatgcccagctaattttttttttatttttatttttagagatgggattttgccatattacccaggctagtctcaaactcctggcctcaagcgatgtgccagcctcagcctcctaaagtgctgggattacaggtgtgagccactgtgcctggcccctagttatctttctaagacacttacttgctcaggtagttccttcttgaaccacagcagtagggcccaagcagagaagatgatagttgctggaaagaaatacatagtaggtggaagggacaacctgagcaaaggctctgaggcaggaagcccatccatggctaggtaatggtatctggtaggtggaatcaagctatgttggagaggcgagtaatgaggctggacagggaacttggggtcacactgtggaaggctttcagtgcaggcctaaggagaaaatggggagccataaaagattttggagaagtttgtatctaataaaaagaataagaatcttcctgctatgcgtggtgctctgcatcttctgctttctgtactcattatttcatctgctcctgcaacctgtaaagtaggaattgtcactactattttaaggaaaatggatgtgtcagccagcaagccagtggcagagtcttggtctccaggctccctgcctcttgcactgactctttctctttcaacctccctgcatgacagctggcaagagcccatccctaatcttcaccaaccggcacgaggtgcggaggatcgacctggtgaagcggaactattcacgcctcatccccatgctcaagaatgtcgtggcactagatgtggaagttgccaccaatcgcatctactggtgtgacctctcctaccgtaagatctataggtgagcggccatatcctctgcagcaaggcatgaagagtgggggtgaggggtggtgacaggtgaggaggggaggagtggtgtctgcctctagagctcctcaggacagagttgggacttgggaagagatgcaggatcacagtggatatggaacttctgggactttactggggctggagtagtctgagggctcccttgggttagcagctttgagccccaaacacctgggatttgtctgacctctggaggcctaatatggaagcacaagacacaggaactgtttggccagggcagaaaggaagaaatcctggctttggggaggactttccaagcagctcacatccctgtgtgttggaacctggggacttagacctggtccctgcccagaggatcccactcacaacacagtgacatccatttgtgatgatcatgagaaagtacagaggaggcctccgaacccacctgggcatctgatctggcatgccttcctggatggcatcaccccaaggccagcttttcactgtctttgacgccacagtcagtggacctggtgcttgggaagctcttcacacactggaggaggttctctcctaggactttctcagatgccagcacctgccccactgcatgtctgggccctcttcaggcagtcatgtcctttctttgtcctgagatccacttggcaggaatgccgatgaccaggcgctgggtagacactgagtcactgatgaaagaatgatgggacagatgggtggaagagtggatggaagcaaatatagcaagtgctactcactgacaactagattcctgcctccctgcaacatacagacactccgttcacacacacccaaaaacataactagaacaatgcctgtccaagagatgtaactgaaagaggcaggatttggtgacagactagatatggggctgatggaagaaatttactccttcatagtgaattttgggagtttcaggtttttggcttgggaggtttcatgaatggtggtgctgttctctgatgtgtgaagcagtagaggaggatcagggctcagggtttgggccgtctggttggccgaggggaagggaatggggatgaacagttttggacatattgagttcaaggtgtccatgggacatccaaggggagctagttagctttgcagtctggatcgtaagagagctgttgggattggagacttagttattgatggcagtggacactaaggaactaatcacccagagagagggcaagaagaagaaaacctctggggaaacagcatttgctattttgctaatgttgcctcctgagtgtctactgtattcttagcccttctttccattctcactggcacggtcattcttcagactctcttaatctcccacccagatgctgtaacgtcctcctaaccagtttccctgcttcattccctctccttccaacccatccactccatagatgccacagtgaactaacatgcttattggactatatcctctggcctgtctagttatcactggggagaaatcctaattccttggcgtggtactcaaagcccatcaagatggggttcctgcctacacctgcttgcagtctgacacccacataagcagctcccctaagtatctcactgttccagagcagactcacctctggccatttgcacaagcctttcttgttccctaatggctttctgtcctggtgacttcatgctcctggtgaactcgtccttcaggactcaactataaagccttctcccgccctctcggatgaggcagtctccatgcctctgctgccatagcctctaatgctttccataatcacattgtattatatctggctcaccctaatgggcagagctgtggagcagccccaccttagaaagccagagaccgtggcccatgtaagtctgtacccctaccctggtaccccagggaatgtgtagagtggaaattatccacgttcctctaaaaatctattgccatggcccagatggaagagaggggaagggtgcacaggtagctccagatgggcccatgggtggaacatctgccccatggtcatctctgttttctcttaagcgcctacatggacaaggccagtgacccgaaagagcaggaggtcctcattgacgagcagttgcactctccagagggcctggcagtggactgggtccacaagcacatctactggactgactcgggcaataagaccatctcagtggccacagttgatggtggccgccgacgcactctcttcagccgtaacctcagtgaaccccgggccatcgctgttgaccccctgcgagggtgagtgtcccaactgaacttcccattctcccaccataggtgctcagtcctcttgtgtctgtcacaagggctatcttgagggttctagaaagctctgggccactcagacacaggccatggggaagaaagtcttgttaatccccaaccaaggttctctgggcattggtcaccaaagttctccctggactctcccacccactcgttatatcgtagaattggagtgtctcagagcagagtagggctctagagatggcctgatagaagctcctgggggaggaagcctttcttcaggctgctgtaggtgagcatctgacagctgctcacatacttccaaagacaggtagctcattacctcccatagggcctgtttcaccgtggggcagctctgctcattagaaagtgggtcttttcccctcataatgccaaatctatctccctgcaacttcctccattggcctctggagttacataaaacatgtctattccctgccctgtgagagagccagcaagatttgaggaccaagatcactggtctgttctgcttcagactgcctgcctccatccctacccctgttgcctatggtctctgggccctcaccacctaggttgccctgctctggccacccctcagttttgggagttagggattctgaacagaacaggactccctctctccctcagtgtggatatcttgagatggtttttttagcgttatatcatgttaagtttaacagaatcaacagctgcttcctactgctatttccttgttaaacagggataagaaaaccctcttcttcgagcaagggcagctggtgaggggagtaccacatgggaggttatgtgaggccttgggaagtgactgatagctgccattcactaagcatgggtcaggtgcttccagcacagaactaggcactctgacagatacggagcctctcctcttaccctcacttcatccctgttctctgtctgttctcatgcagaccttgtgttgcacctgccacatcctgtccctcacatcatagagttacacccagcccaaccccaatccactgcggatcgtcagggtcccaggaggaaacccactgcatactcaagataatcagaggagggtttaataaagggactatttacaaaggagtgggttaggtctaatttactaccttggattagtaacagtgggctgctactggccctagtaggcctgaggagacaaaagcagggagggttacctgagttaggaagctcatccactttctcctctgaaaccagaaaagagagggcttactagggccttccccacactgacaccctagggctctagttagttagcactgccagaagtgggagagatggggtcacaggctattcagctgagtctgggtgcaatctcggagaatagttttcctcaagttctcaaatgaggtgaaggctaaagtgcctgctaaatctaagatttgatggttcaaaagaactttagaggtcttctcagtccctactaaacataaaccacaactagtcaatgggttattgagctcttgtgactcagaccaccccggtcatgtccccagcaagaaggcaaattgggttattttgtcttttaggttcatgtattggtctgactggggggaccaggccaagattgagaaatctgggctcaacggtgtggaccggcaaacactggtgtcagacaatattgaatggcccaacggaatcaccctgggtgagccctgcctttcctgggttgggggcctattctagtgccttgtcctgatcactgtctggaactccatgagtcttgtttctgggtcctctcatggtgccagtgactttgtttcctaatggttgccgtaggctggcctcagtgtgaggcctagaaatgtgggcagggagaggtacaaaggaacagagctccagactggggtcccaggttcatgacctgatcctgcttccttcccaagatctgctgagccagcgcttgtactgggtagactccaagctacaccaactgtccagcattgacttcagtggaggcaacagaaagacgctgatctcctccactgacttcctgagccacccttttgggatagctgtgtttgaggtgagtcctgtaaggagaggcaagggcccactaggaagctgaagcctagaaaatgcttgttcaaataggatgagtccctgagacttgttcaaatgaaaacaggaacagggaaaccaactgatttgtttgtaaacaatctgtgagctgcctgcacacaaaggctctgcagcccactctccacctggcagcctttcccacgctctcttcccaagacccctctcccagagcacttctcacaggtgagctgctaggcatgtatgtttcctctctgtgccctcagcacccagcactgtaacccatatacaaaaggcacccagtaaagggaggaaaggaagaaggaacatacatatccttagaatcatttactggaggaaatggcctgagagatgctgttcaattctgcacacttttattgacctctgccagaccctggggtcatagaagtgaatcagacactatcctagtctcaagaagctcccagcaaagtgaggagcgaagaccctcctgtgccctgaccctaatgacttttcttctccgggaatgaagaagccagaaccaaccaaggtctcacaccttcacctcttcccgaaaactaactccaccaccaaggggagggaaagcaaagggatgatggtctgtggtgggcattggcaggatttgcttgcagcaaagttactcagcactgctctgaagttgtgggcaaagctccacctctaagtccagcccctgctttaaaggacaggtgtgttggtacacaagtgtttgtgcttgtttatatacatggcatgtacatgtaaagtatgtgtatgtgcatgggtaaatataaatgcatcagaataaaagtgtgcattcctctaagtgctggtgcttatgtgtgtacatacatataccaagatgtatatagactgcatatttaggggcaaatgtagctttttgtgtgtggatgaacatttgggtatgtgtttagatctgtgtatgaggatgcacagttgtacctgtacgtgtggatttgctgacagatgcacatctaggcttatatggactaaccatgtggactcgtgtggatacccagaggctacaggaagcccagcaaggcataaccctcatagctcacacattccttccaatcttggtcccaggccccagtaatgataatgctatagagatttaaccttgggtttctgctgggctctagcaagcaggcttagttcagcatgaatgagtaatgttgtggctgtcagttcaaagcacagaatcactgaataatcctctaagatagaagggaacaaggagacgtgcatcacagattagaggctgagagccccaccgtgaatccatagacaggacagatcaggggagatttcagggaagttcttgtgactatggtttggggccaacccctcagactgaggtcatggatttacactccaggcctcccatcctctgcatctataccccacaggacaaggtgttctggacagacctggagaacgaggccattttcagtgcaaatcggctcaatggcctggaaatctccatcctggctgagaacctcaacaacccacatgacattgtcatcttccatgagctgaagcagccaagaggtgagctgtctctggtcctaggtcccaggtcccctgactgtgtcactgtgtcctctcctttcaccaggcaggctgtgttcacattcaggtcacaactcagcaaccccaggaataataacaacaatccctcttgttggtagagtactttttcatcatatattttgtctcattttacctcaagttctttgtgaaataaggctgggtataaatgaatacataactgtcctgtttttgccaatcctacaaagtgtgggtattactcttctaacagttgaggaaacggaagctcagagaggtaaaataatgttagcaggtggcagaactgaaacctaaacccaggtctatctggttccacagctgctttcaccatgacacactgcatctaacttgctatttgtagccattctgcagtagtataagctaatgtatccgagggccatataataagtcagcttattggttgggaatagaatctaggaatcctactactaggttgtcccctcctctatcactaggatacattaattctaactgtaactgaagtgttggctgccagggtgaaagagggagagcaagggagtgtaaggagctaagattggtgcctgattctagacctagaaatttaaatgagagacatagtatgtggcacagggaaaaataaaaaccgcgggcttatgggctttggagcccagccgacctcaatttaagttctatctctagtccagacatggtggctcatgcctgtaatcccaacactgagaggctgaggcaggaggatcccttgagcacaggagctccaggcagcagtgggctatgattgcattactgcactccagcctgggcgacagagcaagacccctacctcttaaaaaaaaaaaaaattcctagagtataggtttgacgaatttgttctctttgagcctaggtgtctttatttgtcagtctgggatgtaacgtccccacctctcagaattgttgcaaggattaaatgagagtgtagggataaaacactaggtatggtgctggaaagtacccaataaaagtagtagggaggccaggcatggtggcttatacctgcaattccagcactttgggaggccaacgcaggaggatcacttgagcccaggagtttgggaccagcctgggcaagaaggcaagactctatcactacaaaaactataaaaatgacccttgtatggtggcatgcgcctatagttccagctactcgggaggccgaggtgggaggatttcttaagcccaggagtttgaggctgcagtgagctatgattgcactgctgcacttagtctaggcaacagagtgagaccctgtctcaaaacataaaacataaaaaaaattgaaaaagtagaagggcttcacaattgcagagatgtggaaccaacctaagtgtccatcaactaatgagtgaataaagaaagtgtggcatatatacaccttggaatactactcagccataaaaaggaacaaaataatgtattttgcagcaacttggatggagctggaagccattattctaagtaaagtatgatagtagtggaaaaccaaaaactatatgctctcacttataagcaggagctaagctatgagtacacaggggcatacagagtatagctaagctatgagtacacaggggcatataatggactttagagactaaaaatggagaaggtaatagcggggctagagatttaaaaaaaaaaaaattacacattaggtacaatgtacactacacttgggttacaggtgcgctaaagtaccagaattcaccactatataattcatccatgtaacaaaaaacgtgtatcccaaaagctttgggggataaaaaaagaaagaaaaagaaaaaaaatgtgaaaaaaaaagtatagggcaagctttttgagcaagccaggtgggagaagcctcatcctcaggaggcaggaagacctggcatgtcctgtctgtgccccagctgtctccctctctgccattagctccagatgcctgtgagctgagtgtccagcctaatggaggctgtgaatacctgtgccttcctgctcctcagatctccagccactctcccaagtacacatgtgcctgtcctgacacaatgtggctgggtccagacatgaagaggtgctaccgaggtaagcagaccttccaggagggatggcccctggcagtgtcagaccctaccctgctgaaatcttcccttggcttctgggacacagtatgctgctggttttcttccatcttccctggttacttgttgccttttgggggtttctcttttttaccttccttgaatgctcatgcccccaggatccttccaaagctttttctcactcccaaggaaaaaatgcacatatacataaaacattttaaattcagtttcagggagtttctggaacgctttaaaaacctcaagttaagaacccttaatcgccgtggcttcaggtacatgcagataactatatatttgcctgtttctcacctagaacttaacaaacactacacagcagcccttttgcaatataattgggactaatagttaatacttcaaccgcatacacagattcatgtcctaatcttgatgtatagccaaggcctttcatttgagcctaagtctactgcattattaatgatttacaggttcaattgtttaaagtggaataagaatttcaatctattggtataacaatatatgagtgtaaaatccttctagatttatctgatttcccctccctacagtctttttattgctgatcttacaactaattccacagcaatgttttaatgactcatctttattgaatcaaagtgaagtgcttagcattcagctaaagaaaagatcatagcccactggggagattaggaaaggcttcacagaagtggcatttgagctacgccatgaagataagttcctaagtatatctcagaggcaataccttaggcaacaaaattatctgtccaagtgacctccatggtatttcccctccagcacctcaatctacctcaactacgacgttagcttctaccatgacgaggacagtacctgccaccacaagagcccccgggaccaccgtccacagatccacctaccagaaccacagcacagagacaccaagcctgacagctgcagtcccaagctcagttagtgtccccagggctcccagcatcagcccgtctaccctaagccctgcaaccagcaaccactcccagcactgtaaggaaatgagttctgcattctttcatgacatgggagggctcctagggaagccaggaagggggtatgtgataagacagaacctaccagagctgaatactgcatatctttgaggaggttactgcatatctgagagggaggtagagtaccagcctgcgatttaggactcataggtgcccctaccttacagagggtcttgtaggaagctgagaccctgtgagcctcagttgcttctcttacaaagtggaaataaccacccttccacaacctgcttcacaagattgccatgatagacaaaggtgtaaccggtataactggaggtgctcacgcacacagccgttgctgactctgcgagggtgtgtgtgtctatgtttcacaaagttctgatgtgtatatgaggaggtgtcccttgtgtttggaaagctctgatctcagttcacagcaggtccccagatagtaatatctacaaccatggtctccttatacctctttccaaccctgggatgaaaataattaagttcaccacttattaaatcattgggagcagtaattgtcactgctagaaatgttctatctcattaatcagcaaatacctttttaattgagttacctgccagagggagttcatttaaaaggataaactatctttttaattttttcccctacatggacagcccagaaaccaagctgcttggcaacatcttcctaactggtcctatttgccagcagaagctggctttttggagtggagcacttactccgaagtttgcagaggcagatggagcatgtgtgaattccagttcctctcatctgagggcagagcctctcaccagcttctcctcactggcttcctcatgctctaggttttaatatcactgtccagtgttcgctgtggcccagagcagggaggacagcagggaggacacagttagctctggaagcaagcagtgcagctttttctccccttaactgttagattctcttggagtaacatggataaacagtcacattgagagaggatgggccttgggccattgccgggacagtcatctcacctgcagcaagtgtagatgatagctccttttcacaccacagggagctgtcaggaggatctaagggaaaaatgctttctgaactataaagtgcttcacaaatgttacaatgaagatggttataagagtgagaaagatggcatggcatagtttttcaaaaagacagtaaattttccaagcacttttcagtttaaaatgtgcttttacatatctttttaaaatttagaccctattcaacaaccccatcccactctccaccctcttagaactaggcaaagttgtgccaagcattttatattcattttagataaattatttcatttaatccttaccatatccctaggaggtaggtaatatcaccattttaaagatataaaagtataataccatgtgctgtatttataatatataataatttgcccaaggtcacatgggtagtgagtagtagagctgggacttgaacccagaagtctgacacagaagtctgcgcttttgattcctctacactatactatgtcccatttcaattacttatgaaaaataatctgataatgcagatggacagacagttcacaaaaaacaatactggcaaagcaacagatactgatggaaaaaggcaaatgacctagtccatcagcaacataaagacctaagtgctcactttgccatgcacagcccccagcttcctactaccatgatgctatggaaagggtatgggacttgggacatgagtcctgggttcaagtcccagctctgccacttttctgaaacccctcagttaagactcagtttccttgcctgtaaaatggagataacctctgtcctgcttgcctcacaggagttgtgataggatctggaaagactgaattattaggcaacagccaggatcatcattttagaatgaggatgagcagcagttgggtagttcttaccacttgaggccagtaggggcttggacacacagtgatagagcatcattctgcaaatgtttgtgttttgcagatgcaaatgaagacagtaagatgggctcaacagtcactgccgctgttatcgggatcatcgtgcccataggtgagtgtggcccccagtcactgaagagaaaagagagaccctgcttaggcctagggaagagcgctagcagggtagagaacttggcctgccctattgacttgttctgcccttgcagccttcctgcccacctcccagtcctgatttaatttggttttttagcctagcacacaaggctcttcaggacctggccccaggtgaccttccaggtacatcccccatctccccacccctcgattcacactctacactccagctatgtgaagtgcgactgtatgatccctaggaacagggctggtatctcttgctcaccattctccccagctcctggcaatgtctagcacatggtaggatatcaaggatttgttgaattaatgaatagagctgcttaccattcctttaataggtcatactgtcttgttttctttctgtttggttttcaacaagtatttattaagcagctactatgtgccaaactctgataaggggaggaaaggcagttaaagatgaataagacatggttctgtcctacaaaagtttatagtcttgttagagagacccacataacacagataagttcattacgacctggtaggtcctaaggttaagctgcatgcactgacttcagagacagtgctgaggaaacacttaacttgggctgggggagggggaagagggaagaggaggtttcctaacagaagtgatatttgagctgggtcagccaagtgagggaggatcaagaacagtccaagcagtgaagacagcatgagtaaagccaggagtaggaaatggcctggaagggtcagggtggggtgggtttagagctagaaggagatcagtatggccagagtataacactttgttaagacctcacagagaatcatgggggctgattcattctcttccaccctgatgaccacacggtatcctgtacacccctctcttagcagtctcatctcgtagcagtatctttgcattctgattgtccattcagagctttatctcccttacttggctatgagtacttcaaggacaggaactttgtccttttatcctgggaatcttcagtatgccgagttagtcagcaaatgttttaaaaacttctcccctgtgtaagacactgactgtgccaagtgccaaggatccagggaagaaaaaaataaagactttaagagctttcagtctttaatcaggcaaaaataaagtcctttaaggtagatgttaatacatgtcattatgtgctatgataggggcatgttggatatagatagagacagaggaacaatgtaatagtggcatgatactcttgtgaagggatggtagaaggaaaggtaattccagagtaaaagtggcgcttctggagaagacagcatttgaattggccttgaaaggcttcaccaggaaagatgatggtgaggtgattattccaggattattttgattggagtggagaaagataaatctacccctttcttgccatcctttgccctatagaaagaggcagatatatgctgttttgctgacataactcactctgaaatattcaatatttttaatttctgctaatctgaggagtgaaagatgagtattatttccctgacatttccctgtgaggtagagtatattttcgtaagcttatcagcccctttacttatattttatctgttatgaatcgcccactcacagtcttttcttatttttctattggctatctttttcttatttatagaaatatttatacatgacaaatattaaacctttaaaatatatgttacaaatattttcttccagtctgacatttggttttaaagtttgtttatggtatcttttgccatgcataaatatgaaacttttaagtatcagatttgtcaatcttttaagatttctgggttttgtgtcttgcttaagaaggccagcctcactctaacttattaaaatatctcctgatgtttttcttttctactttaaacttttttttagtattaggatattaatctatttggaatttaaattttagagtatcgtatgaggtagagatttaactgtttttttctctatatacctgtctagtttccccaaaaccatcattgaataatccatacttctctcctgacttgcacgtcatctttattataaactacctcccatacgtactttgatttgcgtctaagcagtttattttccttcactgatttatatattcctacatactattagcacaacttcatgatatgttatgctcacaacatcttctcagctatttttattcagtttctcttctaggtgaacttcagaataatcttatcaattctataaaaattttggtgaagtttttatcaagattgttttagatatatgagtttatgtgaggagaatatacctttttattatattaaagcttcccatccagaaatgtggcctatttatttcagtcttcttttacgtccctcagcagaattttatagattacacaggacttgcgtatttcttcttaggttttcctaggtattttatagcttttgatgggctattacgaatgtatttttattccattactttttctttttctttttctttttaagagacaagaagatcttgcactcttgcccaggctggagtgcagtggtgcgatcacagttcactgcatcctcgaactcctgggctcaagggattctcctgcctcagcatcccgagtagctgggactacaggcatgcaccaccacacctggctaattttttaaattaatttttttgtaaagaccagggctcaccatcttgcccgggctggtcttgaactccagggttcaagcaatcctcctgcctcagcctcccaaaatgttggtattacatatgtgagccactgtgcctggcctccgttaaattttctaattggttgttgctgattaaaaagacggctaatgatcttttatgttgattcttgattaactaaaattatttctgatagtttttcaccagcttctcttaagagtttctaaaaatacaaatagctgttaataacagtttggtttcctcctttctcatatgtatttatttatttacttttttttttttttttttgagacaaggtctcactctgttgcccaggctggagtgcagtggcatgattgtggctcactgcagccttgacctcccaggctcaagcaatcctcccacctcagccttctgagtagctgggactacaggtgcccgccaccatgcccaactactttgtattttttgtagagatgggttttcgccatgttggccaggctggtctcgaactcctggcctcaagtaatctgcctgcctcagcctcccacagtgttgggattacaggcgtgagccaccgcacctgggctcctttcccatatttatacccttaaatttttttctggccttactgcatagctagatctctaagacaataaatattagcaatgataactgccttgttcctgtctttaatgcttatcaattattgtaatcttactaaaacagaaaccccttccatagcatcctagataggtgatcattcagcctccactgggatgctcagagtgactgctaatcaccttacaaagctacttgctccatttttacccagctgtgttggagagagcttcctcctttaatcattaacatagtcatttattctaaatcagagcttgtgttgccctctgtgtctccttctagagatgttcttcttcaggtggagcctcacctttggaaataaacactctgcctggccccatcccactctccaccccccagttttgggagagaatcgttttcttagagaaatctagggaagcagcagcattagggcaaaggtgtggtaaaattcactcattcattcagcacatgttactaggcacctagtcagtgctaggaactgggcgtagagagtttaaaaacaaaaaaaagacacagtccctgccttgaaagagctatctagttgggagtacagatacataaagtaagatactgtgtgtgatctgggagcacacatgagagagcaactgactctgcccacagttggggaagacttcacatttgaacaggatcttgaaggatgaatagttagtaaaggaaagaagggatgagagatgggctttcaaacagcagtaaaagaacatgcagaaacagagcctgaggagcaaagggtagtaaaagtggagtggtgacaagccttgtacagatgtctgagcagtgggttggagcctgctggaggtccagtgtcctgtgtccttcctccagtggtgatagccctcctgtgcatgagtggatacctgatctggagaaactggaagcggaagaacaccaaaagcatgaattttgacaacccagtctacaggaaaacaacagaagaagaagacgaagatgagctccatatagggagaactgctcagattggccatgtctatcctgcagtaagtatttctcactgggagaattcctaccttccgaccatcttcccttccatcctttcttcccctcccatcctttcttccttcccatcctttcttccctcccttccttccttccgtccttccctccctcctttccttccgtccttccctccctccctgtcttttttctttccttctttccttcctttcctccctccttcccttcctccttctttccttcctcaaacatttatcaaaaacgcaccatgtatcaggcactgttctaggccctggggaacacagaaatgctggggtaggtggttaaggtaaaaaggtatcaggaccaccttgtacctagaggctcttcctggcagtaaaaaaagccaaatgtctctctttctgctcagtaaattttcagaacctttagcctggaagggtaactgtggccatttaattcaaatgtattcatttcaatactgtatgccagttatgtgccaagcaccacattagatatcaagtattcaaaagtcaataaggaacatgcttgctcccaagaagctggtagggagttagagatactaacatacagtggtataattgtgtgctgaatgccgtggtggaagctcaggagtcccctcttctagaaagctatctttggcttgctttgttctcccacagtactctgggcctctctacctcacagcccctgtcacactgtagtccacttgtcttttactcagtggtctcctcactaacccataagatccttgagggcagaactgtctgattaatctgttttcctgatgcctagcacggcatggctgactcccaacaaatatttgttgaacagatgccatggaaacatcaacaagggagctattaattctgtctggggaatcaggcaaggaatgcctcacagagaaggtgacagatggactatgtccttgaaagattaatagcagttttcccgggagagaaggagggaaatggcattccagatagaggcatgtgcaaaggcttgaaggtacaacacagcatggctttttgggggaatgaggaccacaaagtggcacagcaggtgtcactgttatacagcacagtcagggggctgagtgtgacctcagaggtcatccacagtgccatccccctgtcaggcaatcagcagctttgatcgcccactgtgggcagagccctgtcttggggagaccagagaaccggaagacccagcccctgccctcaaggagctttttgtcttgccgggggaaccaaggtcacagctgcaccaactcccgaagaaccctctttccgagctgcctgtcgtcaaatccaaggtagggcagtgccactctaagtctgaggggctggtgagtgagggcatgaaccaaggcaggcgcagccaatcctagaaggctttctggtttgggaaggctgcaaattgtaagctgggtgttggggcaaagaagaaaaatgggttagtcacagaccaatgaatggcatgtggaagaaagcaatcaagtttggggcagggcagacagaattgctgctgaggcaaactgttcatgaaggggagacatgggaaatgagatggagcaaatgaggagggttagcagatggccttgaggatccttaacctcggccagtccaaaaaaatagttgcttgaccagtttttgaagatcagagggagcacagtggaagaagcactgaacttggaataagaaaactcccagttccatccttccactgccctgtgatctcagtcacttctttctgctcactgttatttgtaaaatgagaataacaacccccattctacctgcctcctgagtttataaagtacaagtgagatagcacgtgtgagagcactttgtgacttacaaagcactctgcacatgtaaagtgacattatttccagagaaagaaatgactcagggggagttactcccgatgagtgttaaggaccaagtaataagcttctgccagttgcagagaaataaggaaatcaacatttagtgagcacctactgtgtgtcagacactgttcccagtgttttacatatattttctcatttaatcttcataataaccttatcaagctgatattattcgccccattttgcagatgaggaaactgagactcatagaaattgaataacttgcctaaggtcatagccaggaagtggcagaaccagaattcaaactccagtctgtatatacacaaaagcccatgctctttcctttatatcgtgaggtaaatagccttgaagctctggaaatcaatattctcaacaacctgtctctcctctgtccatttctcggataactgtaccatcactactggggcctatctttggcctagagatctgtcttagagagagtgggagggtagctagactagaataagatagtcttaaatatctacactggtggaggatggccattgcattcataaaaaaactacagataacccaaagatgacttgaaaggcagtagagttactttttatcatatgtagaatgtccagagatgggagatactagtctgattctattttatgttggttacgttgacctaggatattctgggccctatgtgttgttaggtactatgttaaacactctctgtgcattatctcatttgattcctcaacaaccctgtgaggtaggtcctgttactattcccatttgatagatgataaaactaagtctcagagaagtaaagtggctggcccaaattcacataactatgaggaaaagtactgaagctggggagggtctttccaaaggagggtatctgggaaatggaaaagaggcaaacaagattacatcaggactagctggggaaagttagatgtgtaccctggagaagaaaacactcagaatgaacggaagggaattcaaacaccatctataaatttcaagggttgtcctatgtagaactgtctctgagtctgagatggaatcagggaatgtcagaagatataaacaaacaaatttcacattaatataggaaagaatttaaatctgttgtccacaatggaatagactggttcaggggttagtgggctcaccttcccatggtcagccatttttggcagacaggagtctagcatctacctaatgactggaaagcaggggtgagggagagagggatggaatttaattaacctgcattgcctcccaactgtgtttaatctgttgggaaggtgcagtatattacctttctaaatgtgattagcatgctagagacaagtaaccccatagcctgaaatttaacatttgccaaagctaacccactgaaattgaccaaacctaaaatcctataagggaggattaagaaaatttagatctgtgcaactcttctttacaaagatacaaaacagaatgatgaaaaaatctacagctttggattcatacagacctgggatcaaattttagttcagccacttgctatgtgatccagaacaaaccctacttaagctcattgagttttgtttctcatctgtaaaataaataggataaatcctgtctcttaggatagtttgaacattatgtgagctaatacctgttaaagtaacgtaagtctgtgatttgtcaatactaaataaatagtaactcttatggatctaatgatgaattctttggtttgtctccccagcgagtggcattaagccttgaagatgatggactaccctgaggatgggatcacccccttcgtgcctcatggaattcagtcccatgcactacactctggatggtgtatgactggatgaatgggtttctatatatgggtctgtgtgagtgtatgtgtgtgtgtgattttttttttaaatttatgttgcggaaaggtaaccacaaagttatgatgaactgcaaacatccaaaggatgtgagagtttttctatgtataatgttttatacactttttaactggttgcactacccatgaggaattcgtggaatggctactgctgactaacatgatgcacataaccaaatgggggccaatggcacagtaccttactcatcatttaaaaactatatttacagaagatgtttggttgctgggggggcttttttaggttttggggcatttgttttttgtaaataagatgattatgctttgtggctatccatcaacataagtaaaaaaaaaaaaaaaacacttcaactccctcccccatttagattatttattaacatattttaaaaatcagatgagttctataaataatttagagaagtgagagtatttatttttggcatgtttggcccaccacacagactctgtgtgtgtatgtgtgtgtttatatgtgtatgtgtgtgacagaaaaatctgtagagaagaggcacatctatggctactgttcaaatacataaagataaatttattttcacacagtccacaaggggtatatcttgtagttttcagaaaagcctttggaaatctggatcagaaaatagataccatggtttgtgcaattatgtagtaaaaaaggcaaatcttttcacctctggctattcctgagaccccaggaagtcaggaaaagcctttcagctcacccatggctgctgtgactcctaccagggctttcttggctttggcgaaggtcagtgtacagacattccatggtaccagagtgctcagaaactcaagataggatatgcctcaccctcagctactccttgttttaaagttcagctctttgagtaacttcttcaatttctttcaggacacttgggttgaattcagtaagtttcctctgaagcaccctgaagggtgccatccttacagagctaagtggagacgtttccagatcagcccaagtttactatagagactggcccaggcactgaatgtctaggacatgctgtggatgaagataaagatggtggaataggttttatcacatctcttatttctcttttccccttactctctaccatttcctttatgtggggaaacattttaaggtaataaataggttacttaccatcatatgttcatatagatgaaactaatttttggcttaagtcagaacaactggccaaaattgaagtcatatttgaggggggaaatggcatacgcaatattatattatattggatatttatgttcacacaggaatttggtttactgctttgtaaataaaaggaaaaactccgggtatatgtatagatgttcttcattatagacatcttctttgcttttcttggccttgggggaggaagggagaagtgctcttttctacttgtggggtctcccattggaaacataatcctatagtcccagaaggattcagtccccagtggctttcccatccaaagagaaagagtttgagtttcttaactctgctgttctgccacttactcccactagacaaccagggacaaggtgcaacatggaagtgtttgacttaagtaggagcagaggagctgcatctaatctcatcatacctggaacttgacacacttaagcaaatgccttcccatccctacctgccagatgcccccaactcaatgaagttggatgtctcaccagcttgataccctttgaattttcagtcagacattc

SEQ ID NO: 86 - DNA, 4528 bp, Homo sapiens
gccggggcgggcggcagcggcggcggcggcggcggcgggggcagcggcaaccccggcgccgcggcaaggactcggagggctgagacgcggcggcggcggcgcggggagcgcggggcgcggcggccggagccccgggcccgccatgggcctccccgagccgggccctctccggcttctggcgctgctgctgctgctgctgctgctgctgctgctgcagctccagcatcttgcggcggcagcggctgatccgctgctcggcggccaagggccggccaaggattgcgaaaaggaccaattccagtgccggaacgagcgctgcatcccctctgtgtggagatgcgacgaggacgatgactgcttagaccacagcgacgaggacgactgccccaagaagacctgtgcagacagtgacttcacctgtgacaacggccactgcatccacgaacggtggaagtgtgacggcgaggaggagtgtcctgatggctccgatgagtccgaggccacttgcaccaagcaggtgtgtcctgcagagaagctgagctgtggacccaccagccacaagtgtgtacctgcctcgtggcgctgcgacggggagaaggactgcgagggtggagcggatgaggccggctgtgctaccttgtgcgccccgcacgagttccagtgcggcaaccgctcgtgcctggccgccgtgttcgtgtgcgacggcgacgacgactgtggtgacggcagcgatgagcgcggctgtgcagacccggcctgcgggccccgcgagttccgctgcggcggcgatggcggcggcgcctgcatcccggagcgctgggtctgcgaccgccagtttgactgcgaggaccgctcggacgaggcagccgagctctgcggccgtccgggccccggggccacgtccgcgcccgccgcctgcgccaccgcctcccagttcgcctgccgcagcggcgagtgcgtgcacctgggctggcgctgcgacggcgaccgcgactgcaaagacaaatcggacgaggccgactgcccactgggcacctgccgtggggacgagttccagtgtggggatgggacatgtgtccttgcaatcaagcactgcaaccaggagcaggactgtccagatgggagtgatgaagctggctgcctacaggggctgaacgagtgtctgcacaacaatggcggctgctcacacatctgcactgacctcaagattggctttgaatgcacgtgcccagcaggcttccagctcctggaccagaagacctgtggcgacattgatgagtgcaaggacccagatgcctgcagccagatctgtgtcaattacaagggctattttaagtgtgagtgctaccctggctacgagatggacctactgaccaagaactgcaaggctgctgctggcaagagcccatccctaatcttcaccaaccggcacgaggtgcggaggatcgacctggtgaagcggaactattcacgcctcatccccatgctcaagaatgtcgtggcactagatgtggaagttgccaccaatcgcatctactggtgtgacctctcctaccgtaagatctatagcgcctacatggacaaggccagtgacccgaaagagcaggaggtcctcattgacgagcagttgcactctccagagggcctggcagtggactgggtccacaagcacatctactggactgactcgggcaataagaccatctcagtggccacagttgatggtggccgccgacgcactctcttcagccgtaacctcagtgaaccccgggccatcgctgttgaccccctgcgagggttcatgtattggtctgactggggggaccaggccaagattgagaaatctgggctcaacggtgtggaccggcaaacactggtgtcagacaatattgaatggcccaacggaatcaccctggatctgctgagccagcgcttgtactgggtagactccaagctacaccaactgtccagcattgacttcagtggaggcaacagaaagacgctgatctcctccactgacttcctgagccacccttttgggatagctgtgtttgaggacaaggtgttctggacagacctggagaacgaggccattttcagtgcaaatcggctcaatggcctggaaatctccatcctggctgagaacctcaacaacccacatgacattgtcatcttccatgagctgaagcagccaagagctccagatgcctgtgagctgagtgtccagcctaatggaggctgtgaatacctgtgccttcctgctcctcagatctccagccactctcccaagtacacatgtgcctgtcctgacacaatgtggctgggtccagacatgaagaggtgctaccgagcacctcaatctacctcaactacgacgttagcttctaccatgacgaggacagtacctgccaccacaagagcccccgggaccaccgtccacagatccacctaccagaaccacagcacagagacaccaagcctgacagctgcagtcccaagctcagttagtgtccccagggctcccagcatcagcccgtctaccctaagccctgcaaccagcaaccactcccagcactatgcaaatgaagacagtaagatgggctcaacagtcactgccgctgttatcgggatcatcgtgcccatagtggtgatagccctcctgtgcatgagtggatacctgatctggagaaactggaagcggaagaacaccaaaagcatgaattttgacaacccagtctacaggaaaacaacagaagaagaagacgaagatgagctccatatagggagaactgctcagattggccatgtctatcctgcagcaatcagcagctttgatcgcccactgtgggcagagccctgtcttggggagaccagagaaccggaagacccagcccctgccctcaaggagctttttgtcttgccgggggaaccaaggtcacagctgcaccaactcccgaagaaccctctttccgagctgcctgtcgtcaaatccaagcgagtggcattaagccttgaagatgatggactaccctgaggatgggatcacccccttcgtgcctcatggaattcagtcccatgcactacactctggatggtgtatgactggatgaatgggtttctatatatgggtctgtgtgagtgtatgtgtgtgtgtgattttttttttaaatttatgttgcggaaaggtaaccacaaagttatgatgaactgcaaacatccaaaggatgtgagagtttttctatgtataatgttttatacactttttaactggttgcactacccatgaggaattcgtggaatggctactgctgactaacatgatgcacataaccaaatgggggccaatggcacagtaccttactcatcatttaaaaactatatttacagaagatgtttggttgctgggggggcttttttaggttttggggcatttgttttttgtaaataagatgattatgctttgtggctatccatcaacataagtaaaaaaaaaaaaaaaacacttcaactccctcccccatttagattatttattaacatattttaaaaatcagatgagttctataaataatttagagaagtgagagtatttatttttggcatgtttggcccaccacacagactctgtgtgtgtatgtgtgtgtttatatgtgtatgtgtgtgacagaaaaatctgtagagaagaggcacatctatggctactgttcaaatacataaagataaatttattttcacacagtccacaaggggtatatcttgtagttttcagaaaagcctttggaaatctggatcagaaaatagataccatggtttgtgcaattatgtagtaaaaaaggcaaatcttttcacctctggctattcctgagaccccaggaagtcaggaaaagcctttcagctcacccatggctgctgtgactcctaccagggctttcttggctttggcgaaggtcagtgtacagacattccatggtaccagagtgctcagaaactcaagataggatatgcctcaccctcagctactccttgttttaaagttcagctctttgagtaacttcttcaatttctttcaggacacttgggttgaattcagtaagtttcctctgaagcaccctgaagggtgccatccttacagagctaagtggagacgtttccagatcagcccaagtttactatagagactggcccaggcactgaatgtctaggacatgctgtggatgaagataaagatggtggaataggttttatcacatctcttatttctcttttccccttactctctaccatttcctttatgtggggaaacattttaaggtaataaataggttacttaccatcatatgttcatatagatgaaactaatttttggcttaagtcagaacaactggccaaaattgaagtcatatttgaggggggaaatggcatacgcaatattatattatattggatatttatgttcacacaggaatttggtttactgctttgtaaataaaaggaaaaactccgggtaaaaaaaaaaaaaaaaaaaaaa

SEQ ID NO: 87 - DNA, 17021 bp, Homo Sapiens
agcactttgggaagccaaggcaggtggattgcttgagctcaggagtttgaggccaccctgggcaacgtggcaaaatccagtctctacaaaaaacacaaaaattagctgggcacagtggtgcgcacctgctgtcccagctactcgggaggctgaggtgggaggatcacctgagcctgggaggtcaaggttgcagcaaaccaagatcctgccactgcactccagcctgggcaacagagcaaaaccctgtcaaaaaaaaaaaaaaaatctggtctaagcaccacctttgatggaggcaggaatcctgcagcagcctggagccaacccaatggctccctgcctctggtgctctatttcttatcaccatacaggtctctaaggtcacctttaggtctaacattgtatgaatgattgtcagcaactttccaatttttttcatatacatatattttttttattttattttttactttttctttttttgagacaggatctcactctgtcacccaggctggagtgcagtggcgtgatcatagctcactgtagcttcaacctcctgggcacaagtgatcctcccacctcagcttccaaggtacctgtgactacaggaatgcgccaccatgcccggctaattttgttatatatatatatatatatatttgtaccttggttttctcatctgtaacaccaggggttgaagtgctgtgatattttttggttctaggataatttggaaatagggatctcttaacatcttggatactgccaatagatcattcacgaaatccctttagatgagtgttatgtttacttaggtctctaaaacaatttgtaaggtcaacagatggggataagaatgacctgaagctggtcgtctttgttcgcaaccagaaacagtcctgcctcaaaaaaaaaaaaaaaaaaaagggagtaggcaggtggccatatttgtttctggcaagtgagtgctgaaggaaaggagctgaagcctcccacagtcataactggtgctggcaggctactgtctcggtcttgggcgccactgatctaaggtcacggctctgcttgctgctcccacccgctccagtttaaaacctgcggttccagggttctccagcccctccctttttcacgctccgaagccgagaaggcccaaagcgaagacagagaggacccggaagtagggaaaacctctgagcacgtgatgggggaacacgcgggtgctgtcacgtgatccgacaaacggcctctgcatagtgcagaacattctgctgctcttaaaggtacaggcctcagggtccctgctgtagacggggcgggggagagtacgatgggtggggcgtggtgggtcgtagggcgctcgagatggagcccccagcttccttgatggatcgcggggcgcgagtgccctagacaagccggagctgggaccggcaatcgggcgttgatccttgtcacctgtcgcagaccctcatccctcccgtgggagccccctttggacactctatgaccctggaccctcgggggacctgaacttgatgcgatgggaggctgtgcaggctcgcggcggcgcttttcggattccgagggtgagtattcccgcccaccctcatggaacgaccacctctggctcgcagcccacctgaggggaatgagagctgactcggccccgggaggacacgcaaggagcggtcgtgcacctgagagtaggtgggggtcatgccctcttctcgctctcccaggggaggagaccgtcccggagccccggctccctctgttggaccatcagggcgcgcattggaagaacgcggtgggcttctggtgagtggcctgagacttcagcgagtgacaatggcatgagaagagggaagtgaccggaggaaagggggaagaaagagttaagctgcgcaaaggagctgaacccacaaatatttactgaatccactggtttgccccaggggcagcatgtaaaatttccaaacttcactccttatcaccttccggatttagcaagatcctcatacctaccacctgtaggattatttacttttttcttccagccaattcagccttaacgttttttagtgcacatatttttaaaaagaaaactttaaatcacgactccacttggaaaaccagcgttttcctagtgaacgtttaaataaatgcatcactactaaaacttttttatttttttaatttattttattttatcttatttttttttctttttgagacagggtcttgctctgtttcccaggttggaatgcagtagtgcaatcacagctccctgcagcctggaactcctgggctcaagtgattctcccacctcagcctccaagtaggtgtggctacaggtgtgcaccaccgcatctgcctaatttttatatttttttatagagatgggggtctcactatgggacctgggctggtctcaaactcgtggcctcaagtgatcctcctacctcaaccttccaaagtgctgagattacaagcatgagccaccatgccgggcctgaacctttttttttttttttttttttgagacggagtctctctctgtcctccaggctggagtgcagtggcgcaatctcggctcactgcaaactccgcctcccaggttcacaccattcttttgcctcagcctccggagtagctgagactacaggcgcctgccaccacgcccggctatttttttgtatttttagtagagatggggtttcaccgcgttatccaggatggtctcgatctcctgacctcgtgatccgcccgcctcggcctcccaaagtgctgggattacaggtgtgagccaccgcgcccagctttttttttttttttttttaattttattttatttttgagacagagtctcactctatcacccaggctggagagcagtggcacaatctcggctcactgaaacctccacctccaaggttcaagctattctcctgtctcagctccccgagtagctgggattacaggtgcgtgccaccagacacagctaattttttgtatttttagtaaagacaggatttcaccatgttggtcaggctggtctagaactcctgaccttaggtgatccgcttgcctccacttcccaaagtgctgggattacaggcgtgagccaccgtgccccgccctgacataggggctttgggatcacagacttggattcacttccagcctccaaggcctctcccagaaactctctgtgaccactctccttttttttttttttttttgagatagagtctcgctcttgtagcccaggctggagtgcaatggcacaatctcggcttactgcaacctccgcctttcgggttcaagtggttctcctgcctcagcctcctgagtagctaggattacaggcatgtgcaacttcgcccagctaattttgtattttttagtagagacggggtttctccatattgctcaggctggtctcgaactcctgacctcaggcgatccgcccgcctcggcccctcaaagtgctggaattacaggtgtgagccactgcactcggcctcttcctttttattttttatttttgtgacagggtcttgctctgtcacccaggctagagtgcagtggcatgatcacagttcactgcagcctctgactcctggactcaagcaatcctcccacctcagcctcccaagtagctgggactacagtgcaagccaccacacctggctaatttttaaattttttgtagagatgggggtctcactatcttgcccaagcaccaaagcctgtatttttgaccccaacattgaatgaggatgggatctggtgatagagggaaaaaaaagagggggctgattgaagggcacaggtaagggaaggtttggcacaaaggctacagatggctgcaggatgaggagggagttgagacctgtcctgctccttccaggctgctgggcctttgcaacaacttctcttatgtggtgatgctgagtgccgcccacgacatccttagccacaagaggacatcgggaaaccagagccatgtaagtgactctctaccaccaccaccatggttagtccctgtgggaagatgagggggtgggacaaggtggggtaaagtttccagtctctggctgggcacagtggctcacacctgtaatcccagcagtttgggaggctgaggcgggcggatcacttgaagtcaggagttcgagaccagcctggccaacatggtgaaactccgactctactaaaaatacaaaaactacctgggtgtggtggcacacacctgtagtctgagctattcaggaggctgaggcaggagaattgcttgaagccaggaggtggaagttgcaatgagccaagatcacaccactgcactctagcttgggcaacagagtgagacaccatctcaaaaaaaagaaagctcttgaatgtgttatctaaacaaagtccatttacagggccatctgtggcctgtggtctagtagtgtgagactcatatggaaaccccctcttcattgtgcatgcagagacgctgaggtcctgagaagtcagtcactgctgacccaaagccatccttcaagtgaaggcagagctgggacgggagccaggctctgtgtgtctatccctctgcctccagggtgaaagacatgcttttctcccattaggtggacccaggcccaacgccgatcccccacaacagctcatcacgatttgactgcaactctgtctctacggctgtgcgtactcatctcacctggtccttgcctgacccagggcccctgggtctatagaccccactcccagcccttcactacccagctgggactgtcatgattaaaacagttgagacctgggctgggcgcactggctcacacttgtaatcccagcactttgggagaccaaggtgggaggatcacttgagcctaggagtttgagaccagcctgggcagtatagtgagacccccatcttaaagaaaaaaattaaaaaatatatatatataaaataattgagaccttaatataatttctgaggctgaggcggatggatcacttgagaccaggagttcaagaccagcctggccaacatggtgaaaccccatctgtactaaaaatacaaaaattagccaggcatggtggtgcacgcctgtaatcccagctactcaggaggctgaggcaggagaatcacttgaacccaggaggtggaggttgtagtgagccaagatcgagccactacactccagcctgggtggcagaatgagactcactctcaaaatatatatatatatagtttctgagtcctttctgtctgcaccatatattagctcatttaagccacacagcagtcctgtgagctaggtgctatgatattcccattttccagatgaggaaactgaagctcagagagtataaactcttgacacacaactaaggagtgggagagctgagacttgaacccaggcgtgcctgactccagagcctgtgtttgtagcaggcctgtttggccagctcctgcctctccttggccacgtggttgggagggttgtcccctggaagctctgcggtctcactctattctcctgtcccaggctgtgctcctggcggacatcctccccacactcgtcatcaaattgttggctcctcttggccttcacctgctgccctacaggtctgggtgagggtagtgggaggcagggtgggcaggagctgagaaaggggaggctgggatggctgagatgctgagagtagagaccgaccttccccctcccttcccttctcaccccctcagcccccgggttctcgtcagtgggatttgtgctgctggaagcttcgtcctggttgccttttctcattctgtggggaccagcctgtgtggtgagtgtgtggttctgtgtcagatggggagccccgaggaaccacatcagagcatttgtgggaagagtctccccagcctcccagaggaaagggattcattctgtcacccttagaagcctgctagggctatcagcagtaggcgatgggagactgggacaatttggaggggtaggcagtggaggagatgggagaaaatggatgaattagatggagattgaggtgaacaaagtcaagactctgtgatggaccaggcacagtgactcatgcctataatcccagcactttggaaagccaaggcaggcagatcacctgaggtcaggagttcgaaaccagcctggccaacatggagaaaccccgtctctaccaaaaatacaaaaattagctgggtgtggtggcaggagcctgtaatcccagctactcgggaggctgaggcaggagaatctcttgaacctgggaggcagaggttgcagtgagccgagatcacgccactgtactccagcctgggtgacagggcgagactccgtctccaaaaagaaaagaaaagaaaaagactgatgaaggggcagagacatcaagggtgcatgtctgcccctggtctgataactgggtggatggaggtgccactctccatgaagggacacgcaggggagtggggctctgcttcagacctggaacctggcctatgcatgggatctattggagcctctatgagctgatactgaggaggccatggccagacacattagaggcctgggcagtgtggcaaggtgtggtgtgaccatcccagtgcttgtcctccccccaggtgtggtcttcgctagcatctcatcaggccttggggaggtcaccttcctctccctcactgccttctaccccaggtaagcaggtggagcagggagtgtggggagaggctgtcccatggtcagcctaggtcctcctgaatgttcctgtgttctccttcccagggccgtgatctcctggtggtcctcagggactgggggagctgggctgctgggggccctgtcctacctgggcctcacccaggccggcctctcccctcagcagaccctgctgtccatgctgggtatccctgccctgctgctggccaggtgagctgccctgagccgggagggagaggggtccaaggagagaaaacttggccatggctgggtgtggtggctcacgcctgtaatcccagcactttgggaggccaaggagggcagatcgcctaaggtcaggaaaccagcctggccaacatggtgaaaccccgtctctactaaaaatacaacaattagccaggtgtggtggcgggtgcctgtagtcccaactactcaggaggctaaggcaggagaatcgcttgaaccccggaggcagtggtggcagtgagccgagatcgtgccattgcactccagcccgggcgacagagttagactctgtctcaggaagaaaaaaaaaaaaagaaagaaaagaaaacttgattatgattgcaatcttcaagtccctaccttgctgtgaagggaggcggaatctggactctgatagccccaggtgtgagtcctggagctgccactttttagctttgtagcgttgaacaagttactccacctctctgaaccctcagtttccccatatctcaaatggcagttgttcttgctttccttggaggtgatgagggtaatgcattcagcacagtgtggttcccaaggtgattagaagtaggatgagggtggactttatttgattagttccttttttttttttttttttttttaatcagtgttgaccaggttggcctcgaatgtgtagccttgcctgcctgagtgccagggcaacaggcctgaaccatggcgactcccttttttttttttttttttttttttttttgagacggagtctcatggtgtcactcaggctggagtgcagtgactggtgtgatctcagctcactgcagcctcggcctcccgggctctagtgattctcctgcctcagcctcccgagtagctgggactacaggcccatgccaccatgcctggctaattttttatatttttagtagagacggggtttcactgtattggccaggctggtctcaaactcctgacctcaagtgatccacctgccttggcctcccataatgctaggaatacaggcgtgagccaccgcgcccggcctgattagttctgtgtattttcatgcatattacaaaacactttggccgggcatggtggctcacatctgtaatcccagcactttgggaggccgaggcgggcgcaccacgaggtcaggagtttgagaccagcctggccaatatggtgaaaccccgtctctactaaaaatacaaaaattagccaggcttggtggcgcttgcctgtagtcccagctacttgggaggctgaggagaagaatcgcttgaacccaggaggcagaggttgcagtgagccgtgattgtgccactgcactccaggctgggcaacagagcgagactccgtctaaaaaaaaaaaaaacacacactttgaactagccagacacacctggcccttcacaagattagtgcttaggacaagtctaagtagaaaaagtgagtccatttaaagaaaaatattaagtaaaaatatatatatacaggaggaatatggatatggcaaataacatgaagccagaacctaagtgactaaaatcgaggaagttctggcctagcacagagtgaacgtataattaatgggagctagagcgaccattagaataataatggccagaaaacagaactgactcgctaggtatgagccagcagtccgaacaagggcctgctgagcacagtggctcacagctgtaatcccagtgctttaggaggctgaggctggaggaccactagaggctagaaatttgagaccagcctgggcaacatagcgagactccatttatacaaaaaatggaaaatatgaggcgggcttggtggcacgtgcctgtagtccccgctacttgggaggctgaggcgggaggattgcttgagcctgggaggtcgcggctgcagtgagctatgattgcaccactgcattccagcctggatgctggagaaagaccctgtctctgaaaaaaatcaaaacaaaatgaaggcccatgaataggaataaggagataaattcaggtccaaagaaagaagcctttgtccacaattggagctctcccgcacagcgtaggagccttagaggcagtgagctacccatctttgaaagtgttcaaaggtagaggtgttccctgggaaaagtggcctagatggtccctggggaccttcccagccagtagggttttctgaccctgccttcatcctactcctagctatttcttgttgctcacatctcctgaggcccaggaccctggaggggaagaagaagcagagagcgcagcccggcagcccctcataagaaccgaggccccggagtcgaagccaggtaggagacacagaccctcagagaggtcactttctttctctctgggtttggccttttcctctctgcaataggcaaagttaagaggggaaagagagtgagtgtactggttatgggaaaagcctttgtctatttgagaaatacttgttgaggacgagcacagtggctcacgcctgtaatatcccagcactttgggaggctgaggcaggaggaccacttgagctcagaagtctgagtccagcctgggcaacagagcaagaccttgtcgcaaaaaaaaaaaaaaaaaaaaaaaaaagaaaagaaaggaaggaagggagggagagaagaagggatattaattgagtacttaccatgtgccaggcattccaatcacaagtgctgaggccctgcggtggggataagctgggatgttctagaaccagagaatggccagtgagactgggcagggtgggccaatggccatctgtggagctgtacaagagacattggccgggcgtggtggttcatacctgtaatcccagcactttgggaggctgaggcagatggatcatttgagatcaagagtttgagaccagtctggccaacatggtaaaaccccgtctctactaaaaataaaaaaattagccaggtgtggtggtgcatgcctgtagtcccagctacttgggaagctgaggcacgagaatcacttgaacccaggaggcagaggctgcagtgagctgagattgcaccactgcactgcagcctgggcaactgagtgagactctgtctcaaaaaataaaaaaaattaaaaatcaaagagacgtgaagaggtctcacctggttagcttttattttcatcatgataaagtatgtatattacttgaagtttaccattttattattttttatcttactttatttttttgaggtggagtttcgctcttgttgcccaggctggagtgcaatggcgcaatctcagctcactacaacctctgcctcctgggttcaagtgattctcctgcctcagccacccgagtagctgggactacagacacctgccaccacacatggctaatttttgtatttttagtagagatggggtttctccatgttggccagggtggtcttgaactcctgacctcaggtgatccgcccacctcagtctcccaaggtgctgggattacaagcatgagccactgcgcccagccattttaaccatttttaagtgtccaatccagtggcatggaagtgagttcccactgttgcgtggtctggttaattctgtcataccggtgcctctttgccgagtcttcagtgtgaaaacttcatctgcccttctctctctgttcccctgcaggctccagctccagcctctcccttcgggaaaggtggacagtgttcaaggttcggatgatggctggggtatgtccctgtggggcttgctcacctccaggccccccgcttatatcttctgccttttccagggtctgctgtggtacattgttcccttggtcgtagtttactttgccgagtatttcattaaccagggacttgtaagtgaggggtgctaggaggggtgtggaggtggcgattggggctgggacccacacagccccgtccatctcccctgtctggtatttgttgcagtttgaactcctctttttctggaacacttccctgagtcacgctcagcaataccgctggtaagaggagcgagggcagtgggctgggagggcgccgtggtgatgcagctgccctgcccagtaggcaccggggggagcgggatggtccctggaggagcctcctctcctccccccaaccctaacctcaggtaccagatgctgtaccaggctggcgtctttgcctcccgctcttctctccgctgctgtcgcatccgtttcacctgggccctggccctgctgcaggtaccaaacccctgcccctcacttcactcccaccttggctcccagcttggctcccagcttccccaaaccccctgcttcccactatcagtgggaagtgtaaatttttttttttttttttgagacagagtctcgctctgtcgtccaggctggagtgcagtagcgcaatcttggcttactgcaacctctgcctcccgggttcaagtgactctcctgcctcagtctcctgagtagctgggattacaggcgcccgccaccatacctggctaatttttgtatttttagtagagatgggattttgccatattggctggtcttgaactcttgacctcaggtgatctgccggcctcagcctcccaaagtgctgggattacagggaagtgtaaattgtacactatcatttcttagcacagggaaccaaagtccagcagagctccatgtaaaatgtatagcctcaggagccaagcaaaactgagcttcagtactcagccactgtgtgacttagggcaggtctcagaacctctctgagcctcaatttcctcatgtataaattgggtgtggccaatacctatttttcagggtagttgtaagaaatagagatgagagaaagaatcgaagaacaagattttgtagtgtgtgtgtgtgtgtgtgtgcgtgtgtgtgtgtgtgtgtgtgtgtgtgtgtgtgtgttttaagcattgggattgggccgggccaggtggctcatgcctgtaatcccagcactatgggaggctgaggcaggtggatcatttgagcttggtagttcaagtccagcctgggcaacatggcacaatcacatctctacaaaaattagccaggtgcagtggcgcacacctgtagtcttagctactgggaagctgaggtgggaggatcacttgaacccatgaggtcaaggctgcagtaaccaaggtcatgccactgcactccagcctaggcaatagagcgagaccctgtctcccagaaaaagaaaaaagaaaggaaaagtcggaaccttcctctgtcgcctaggctggagtacagtggcatgatcataggtcatttacctcaggcaaagagacaggctttcaaataatgtttctaactataagaaaatgtacagttcttttattctagatagttaattataatagaattggtgactttgaagtcagtgggttatttatcttgagggtggtgagcaaattcaactgcccttggcaaacagtagtttacagctttaagggcgcaaacacccttccttacaacagtctaataaaaggagtttcatataaccagcattcattgtttcaaggttacaaatccacagcccctgcaggtaactgttacaataaactgtcaactgtgacaggaaagtcttctgcctttgaaatttaggaacttggccagtcctggtggctcacacctgtaatcccagcactttgggaggccaaggcaggtgaatcacctgaggtcaggatcaggagtttgagaccagtctggccaacacagtgaaaccccgtctctattaaaaatgcaaaaattagttgggcgtggtggcacctgcctgtcatctcagctactcgctaggctgaggcaggagaattgcttgaactccggatatggaggttgcagtgagccgagattgcagtactgtactccagcctgggccacagagcgagactccatctccaaaaaaaaagacttaggaactcaattctgtgatagcaaaatacagaaatagagattatactttaggctaggtgttgtggctcacacctgtaatcccaatgcttttggaggctagggtgggaggatcactcgaagccaggagcttgagaccagactggacaacatagtgagaccccccacctctacaaaaaattaaaaaaaaaaataagccaggtgggagaattgcttgagcccagaagtttgagagagcagcctgggtaacatcacgagacctcatctctacaaaaaacaacaacagggtgtggtgacattcacctgtaatcccagctactcgggaggctgaggcaggaggatcgctttagcccaggagttccaggctgcagtgagccataatcatgccactgtaccccagcctgggtgagaccctatctcaaaaaaaaagattacactttcatattatggcaaaagcatgtaaatatcctccagcctccttccttatttatctgagcagtgctgcaagcccagggtttgtacccacaaaaccccaaatttataactcagggtgcttgtagataccactgaaacatgtagcttatggttttaagctacatgtttttagctataatgttttttgttttgttttgttttttgagatggagtctcgctctgttgcccaggctggaatgtagcggtgcaatcttggctcactgcaacccctgcctcccagattcaagcgattctcaagcctcagccttccgagtagctgggattacaggtgcgccaccacgcccagcaaattttttgttttgttttgttttgttttgttttttagagacagagttttgctcttgtagctcaggctagagtacaatggcgtgatcttggctcactgcaacctccgcctcccaggttcaggcgattcttctgcctcagcctcctgcgtagctgggattacaggcacgtgccaccacacctggctaatttttgtattttttagtagagatggggtttcgccatgttggccaggctggtcttgaactcctgacctcaggtgatccacccgccttggccttccaaagtgctgggattacaggtgtgagccaccacacctggctagaggtgtgtcctttttaatgctcatctttaagtctacctcagatttaatgaattaggacctctagggtaagccccgcttggggcatttgtacctagatccccaggcaattcttacatatacgaaaagtatgaaccgccacgaggaggcctacacactgcacaagaggcaatgtggcgtggtcagtgctgggaggatggcacctccttgagagactggggcacagaggtgggacctacaccctggggtggggatcgaagaggcttcctggccaggtgcggtggctcctgcctataatcccagcactttgggaggctgaggcaggggggcagcgactgcttgagaccaggagttcgagcccagctgaataggatgcccggctactcccaccttgttttaccatagtgaaccaacggtttttccaataggggcaattttgctgcccagcggatgtttggcaacgtctgcaggcatgctttggttgtcacaactgagggatgctatgggcatctagcgggcagaggccagggatcctgctaaatgcgctgccatatacaggacagccctcaccatgcagaacaaccagcaccaaacgccaagagtgctgcaattgagaaatcctggtttcgatggtcccacttcctttaagaagcctccatttttttttttttttttttttttttttttatgagacaggatcttgctctgtcacccaggctggagtgcagtggcacaatcatagcttactgcagcctccacctcctaggttcaagcaatcctcctgtctcagactcccgagtagctgggactgcaggtgcgtgccaccatgctcaactaatttttaaattttttgtagagacggagttttgttatgttgcccaggctggtctcgaactcctggcctcaagtgatcatcccaccttggtctcccaatgtgctggtattacctgcatgagccactgcaccaggctgaggttgagaattttttttttttttttttgggatggagtctctctctgttgcccaggctggagtgcagtgctgcgatcttggctcactgcagcctctgcctcccaggttcaagtgattctcctgcctcagccttccaagtagctgggactacagaaccactacacccagataatttttgtatttttagttgagatggggttttaccatgtttagtagagaccaggccaggctggtctcgaaatcctgacctcaggtgatctgcccacctcagcctcccaaagtgctgggattacaggtgtgagccaccacaccgggctggtgttgagattttatctagacctggcagccctctccttcaccagtaactcctaaaaccagggacccctggaggggaggccacctctccttccctgccccgccctggtcccaggcttagcctctccccctgttcacagtgcctcaacctggtgttcctgctggcagacgtgtggttcggctttctgccaagcatctacctcgtcttcctgatcattctgtatgaggggctcctgggaggcgcagcctacgtgaacaccttccacaacatcgccctggaggtcagcattggccgggcaagggctgggggtggcctgtccagggacacccagggcagggatgtctgggactgaagcctcacccctgctctctgccctcccagaccagtgatgagcaccgggagtttgcaatggcggccacctgcatctctgacacactggggatctccctgtcggggctcctggctttgcctctgcatgacttcctctgccagctctcctgatactcgggatcctcaggacgcaggtcacattcacctgtgggcagagggacaggtcagacacccaggcccaccccagagaccctccatgaactgtgctcccagccttcccggcaggtctgggagtagggaagggctgaagccttgtttcccttgcaggggggccagccattgtctcccacttggggagtttcttcctggcatcatgccttctgaataaatgccgattttatccatggacttcttatatcgtttttgtctctaaaaagaaacttttattatgaaagtaatacatgcccactttcctatatatagacagcataaagaaggtatgtcagcagatttctcccttttttgtttgtttgtttgtttgtttgtttgttttgacagagtctcactctgtcacctaggctggagtgcaatggcgtgatcttggctcactgcaacctccacttcccggttcaagcaattctcctgcctcagcctcccgagtagctgggattacaggtggtcactaccatgtctggctaatttttatatttttagtacagacgacattttgccatgttggccaggctggtctcaaactcatgacctcaggtgatccgcccaccttggcctcccaaagtgctgagattacaggtgtgagccactgtacctggcctctgccatctttgaggccttacgtattcattcattcatgcattcattgtttgggacaatctgtaaacaatcatgttggacattctttccagcatgaaagttttcagagaagtggaaagaattgtgcagtgaatcatcctgagtatgcgccaccctgttctatgttaacattttgttacagttgttttatcatgtagtccagcccccatcaaatctatgtattcactgttccatcagtgagtagatagagctaatgaatggcagggttggcacctgaggcattttattttattatttttttttatttttagagacagggttgcactctgtcacccaggctgaagtacagtggcacagtcatggctcactgtagccttgacctcctagactcaaacaatcctcacaccttggcctcccaagcagctgggactgcaagtgcatgccaccaagcccagctaatttttttttttttttttgtagagacgcgatcttcctatgttacccaggctggtcttgaactcttgagctcaagcagtcctgccttggcctcccaaagtactgagattacaagcatgag

SEQ ID NO: 88 - skipped

SEQ ID NO: 89 - DNA, 1915 bp, Homo sapiens
ataactggtgctggcaggctactgtctcggtcttgggcgccactgatctaaggtcacggctctgcttgctgctcccacccgctccagtttaaaacctgcggttccagggttctccagcccctccctttttcacgctccgaagccgagaaggcccaaagcgaagacagagaggacccggaagtagggaaaacctctgagcacgtgatgggggaacacgcgggtgctgtcacgtgatccgacaaacggcctctgcatagtgcagaacattctgctgctcttaaagaccctcatccctcccgtgggagccccctttggacactctatgaccctggaccctcgggggacctgaacttgatgcgatgggaggctgtgcaggctcgcggcggcgcttttcggattccgagggggaggagaccgtcccggagccccggctccctctgttggaccatcagggcgcgcattggaagaacgcggtgggcttctggctgctgggcctttgcaacaacttctcttatgtggtgatgctgagtgccgcccacgacatccttagccacaagaggacatcgggaaaccagagccatgtggacccaggcccaacgccgatcccccacaacagctcatcacgatttgactgcaactctgtctctacggctgctgtgctcctggcggacatcctccccacactcgtcatcaaattgttggctcctcttggccttcacctgctgccctacagcccccgggttctcgtcagtgggatttgtgctgctggaagcttcgtcctggttgccttttctcattctgtggggaccagcctgtgtggtgtggtcttcgctagcatctcatcaggccttggggaggtcaccttcctctccctcactgccttctaccccagggccgtgatctcctggtggtcctcagggactgggggagctgggctgctgggggccctgtcctacctgggcctcacccaggccggcctctcccctcagcagaccctgctgtccatgctgggtatccctgccctgctgctggccagctatttcttgttgctcacatctcctgaggcccaggaccctggaggggaagaagaagcagagagcgcagcccggcagcccctcataagaaccgaggccccggagtcgaagccaggctccagctccagcctctcccttcgggaaaggtggacagtgttcaagggtctgctgtggtacattgttcccttggtcgtagtttactttgccgagtatttcattaaccagggactttttgaactcctctttttctggaacacttccctgagtcacgctcagcaataccgctggtaccagatgctgtaccaggctggcgtctttgcctcccgctcttctctccgctgctgtcgcatccgtttcacctgggccctggccctgctgcagtgcctcaacctggtgttcctgctggcagacgtgtggttcggctttctgccaagcatctacctcgtcttcctgatcattctgtatgaggggctcctgggaggcgcagcctacgtgaacaccttccacaacatcgccctggagaccagtgatgagcaccgggagtttgcaatggcggccacctgcatctctgacacactggggatctccctgtcggggctcctggctttgcctctgcatgacttcctctgccagctctcctgatactcgggatcctcaggacgcaggtcacattcacctgtgggcagagggacaggtcagacacccaggcccaccccagagaccctccatgaactgtgctcccagccttcccggcaggtctgggagtagggaagggctgaagccttgtttcccttgcaggggggccagccattgtctcccacttggggagtttcttcctggcatcatgccttctgaataaatgccgattttatccatggaaa

SEQ ID NO: 90 - DNA, 1879 bp, Homo sapiens
gtgctgtcacgtgatccgacaaacggcctctgcatagtgcagaacattctgctgctcttaaaggtacaggcctcagggtccctgctgtagacggggcgggggagagtacgatgggtggggcgtggtgggtcgtagggcgctcgagatggagcccccagcttccttgatggatcgcggggcgcgagtgccctagacaagccggagctgggaccggcaatcgggcgttgatccttgtcacctgtcgcagaccctcatccctcccgtgggagccccctttggacactctatgaccctggaccctcgggggacctgaacttgatgcgatgggaggctgtgcaggctcgcggcggcgcttttcggattccgagggggaggagaccgtcccggagccccggctccctctgttggaccatcagggcgcgcattggaagaacgcggtgggcttctggctgctgggcctttgcaacaacttctcttatgtggtgatgctgagtgccgcccacgacatccttagccacaagaggacatcgggaaaccagagccatgtggacccaggcccaacgccgatcccccacaacagctcatcacgatttgactgcaactctgtctctacggctgctgtgctcctggcggacatcctccccacactcgtcatcaaattgttggctcctcttggccttcacctgctgccctacagcccccgggttctcgtcagtgggatttgtgctgctggaagcttcgtcctggttgccttttctcattctgtggggaccagcctgtgtggtgtggtcttcgctagcatctcatcaggccttggggaggtcaccttcctctccctcactgccttctaccccagggccgtgatctcctggtggtcctcagggactgggggagctgggctgctgggggccctgtcctacctgggcctcacccaggccggcctctcccctcagcagaccctgctgtccatgctgggtatccctgccctgctgctggccagctatttcttgttgctcacatctcctgaggcccaggaccctggaggggaagaagaagcagagagcgcagcccggcagcccctcataagaaccgaggccccggagtcgaagccaggctccagctccagcctctcccttcgggaaaggtggacagtgttcaagggtctgctgtggtacattgttcccttggtcgtagtttactttgccgagtatttcattaaccagggactttttgaactcctctttttctggaacacttccctgagtcacgctcagcaataccgctggtaccagatgctgtaccaggctggcgtctttgcctcccgctcttctctccgctgctgtcgcatccgtttcacctgggccctggccctgctgcagtgcctcaacctggtgttcctgctggcagacgtgtggttcggctttctgccaagcatctacctcgtcttcctgatcattctgtatgaggggctcctgggaggcgcagcctacgtgaacaccttccacaacatcgccctggagaccagtgatgagcaccgggagtttgcaatggcggccacctgcatctctgacacactggggatctccctgtcggggctcctggctttgcctctgcatgacttcctctgccagctctcctgatactcgggatcctcaggacgcaggtcacattcacctgtgggcagagggacaggtcagacacccaggcccaccccagagaccctccatgaactgtgctcccagccttcccggcaggtctgggagtagggaagggctgaagccttgtttcccttgcaggggggccagccattgtctcccacttggggagtttcttcctggcatcatgccttctgaataaatgccgattttatccatggaaa

SEQ ID NO: 91 - DNA, 1797 bp, Homo sapiens
gtgctgtcacgtgatccgacaaacggcctctgcatagtgcagaacattctgctgctcttaaaggtacaggcctcagggtccctgctgtagacggggcgggggagagtacgatgggtggggcgtggtgggtcgtagggcgctcgagatggagcccccagcttccttgatggatcgcggggcgcgagtgccctagacaagccggagctgggaccggcaatcgggcgttgatccttgtcacctgtcgcagaccctcatccctcccgtgggagccccctttggacactctatgaccctggaccctcgggggacctgaacttgatgcgatgggaggctgtgcaggctcgcggcggcgcttttcggattccgagggctgctgggcctttgcaacaacttctcttatgtggtgatgctgagtgccgcccacgacatccttagccacaagaggacatcgggaaaccagagccatgtggacccaggcccaacgccgatcccccacaacagctcatcacgatttgactgcaactctgtctctacggctgctgtgctcctggcggacatcctccccacactcgtcatcaaattgttggctcctcttggccttcacctgctgccctacagcccccgggttctcgtcagtgggatttgtgctgctggaagcttcgtcctggttgccttttctcattctgtggggaccagcctgtgtggtgtggtcttcgctagcatctcatcaggccttggggaggtcaccttcctctccctcactgccttctaccccagggccgtgatctcctggtggtcctcagggactgggggagctgggctgctgggggccctgtcctacctgggcctcacccaggccggcctctcccctcagcagaccctgctgtccatgctgggtatccctgccctgctgctggccagctatttcttgttgctcacatctcctgaggcccaggaccctggaggggaagaagaagcagagagcgcagcccggcagcccctcataagaaccgaggccccggagtcgaagccaggctccagctccagcctctcccttcgggaaaggtggacagtgttcaagggtctgctgtggtacattgttcccttggtcgtagtttactttgccgagtatttcattaaccagggactttttgaactcctctttttctggaacacttccctgagtcacgctcagcaataccgctggtaccagatgctgtaccaggctggcgtctttgcctcccgctcttctctccgctgctgtcgcatccgtttcacctgggccctggccctgctgcagtgcctcaacctggtgttcctgctggcagacgtgtggttcggctttctgccaagcatctacctcgtcttcctgatcattctgtatgaggggctcctgggaggcgcagcctacgtgaacaccttccacaacatcgccctggagaccagtgatgagcaccgggagtttgcaatggcggccacctgcatctctgacacactggggatctccctgtcggggctcctggctttgcctctgcatgacttcctctgccagctctcctgatactcgggatcctcaggacgcaggtcacattcacctgtgggcagagggacaggtcagacacccaggcccaccccagagaccctccatgaactgtgctcccagccttcccggcaggtctgggagtagggaagggctgaagccttgtttcccttgcaggggggccagccattgtctcccacttggggagtttcttcctggcatcatgccttctgaataaatgccgattttatccatgg

SEQ ID NO: 92 - DNA, 67597 bp, Homo sapiens
cagcattaggccagtgcggccaaggagggatcaacatcactccgcacttacccggtttgtaccagcgagtgaagtatcgatccacgagcgaaggcaccaccggctccgcggcttcgggctcggtagccatggcgacctccggcgccgccacccccgccctccgggaccccagcgcttcctccgcgcagcccggactgggcgtgctcttccggcgcacagcgcgtgtcgtgcgcacgcgcgctgctctcaggtccgcaggttccacccccccccccgccccccccaattacagtgctttggggttcgacatcaaaacagagatcaaatacaaaagtttgggcagatgggcaagagggcagagggacaggggacgcggccaatgtagctcctctacctctacggtgccaggcctacaaagaaggccggccgccgtaagtgaccagaagcgggcccggcctcgccccctccgcctggtgacgtcactcccgcgccgcactcccagtgctgcggctgcctagttgacgcacccattgagtcgctggcttctttgcagcgcttcagcgttttcccctggagggcgcctccatccttggaggcctagtgccgtcggagagagagcgggagccgcggacagagacgcgtgcgcaattcggagccgactctgggtgcggactgtgggagctgactctgggtagccggctgcgcgtggctggggaggcgaggccggacgcacctctgtttgggggtcctcaggtaagcgatccatccagggtaggggcacgggagtggacctctccgccggcggtgtccgggtgaaggagacccggagcctcctctgcctgctgcgggccggggactggagtgcgggctgcaccacctctttcctagagccttaaattctttttgcagccttgccacctgctccatcgggggcgctgggaggcgcgacagcccagggatgcctgctgcccctccagccggacttaacccagcctcttgattgcttgcagggggttgataataacgctgaaagcgagagtattaattcacgatggaaggcggcggttaatagaggctcgggtgctgtggtgcgggtcctttctcgcgtgtgagactttttcgtggaggtggtgtcctctgtgcttctccatctaacgtggtgttttacgtggctttctctcccgttaacgatgatctccgtggagacagtggctgagtaatcttcagatcccagtacttagcaagtgctcagtcggtgttggatgtaggccacaaaccggatcgtaaagaattcaactgtatattgacagccacggaactaatcaatgaatagatccgtatgaagagtaagcaaaaaggcagcaaagacagtttttcagcttggggacatagagtagaaatggtctgtccccaaatagtgggaactgtcatttgggggaagaatagcaagttctttgctttccaggtcgcatttgatgtgcatgtgagacatgcttgtgattctatcaggaggttgaaaatgtgggtttagtggtaagtttgggctaattcagtcagggctaggcatttaggcctaatcagcgtattggtgatctacctggtatatgtaatcatgcatgtgatgtctagccaagaggtggatagtcgaaggagcaagggaagaaaatgaagcagttatcaggaaattaagagagaatccacgattgacctttggtgtggagggatctttagcacatttaagaactgcgaagagtttgaatcagtggaggcaggaaggttggaggttgcagatgtccaagaaagagtactaataggcctaggtcctgtggcaatatggaggatattcctttcctagcctggaaagaagtggagggaagtcttcctccgagaagataagggaataaggctgatgggtgtgaaatttcagagaaactagttttgaggcgtttttatgatgtttaaagatgaaaaacgcagccaggcacggtggctcaggcctgtaatcccagcactttgggaggcagaggcgggtggatcacttgaggttaggagttcaagaacagcctggccaacatggtgaaaccctgtctctactaaaaatacaaaaattaactgggcatggtgccgggcgcctgtaatcccagctactccggaggctgaggcaggagaatcgcttgaacccgggaggcagatgttgcggtgagccgagatcgcgccattgcaccccagcctgggcaataagagcgaaactccgtctcaaaaaacaaaaaaacctgcatgatatgttagaggttcaagtaatttctagcagttcttgaatataattgtcaccaaaacttactaaaatcattgtcttcctcacttccatcatatataaacttacctttctcttatcccacattatatattatataattcctatgacacttgacattatcttctgtgtactattaggattgattcatctttattctttctatgtcatacatatgtggggtgccaagatgagagaagtctccttggattaaagtgacaataagaccggtgtggtccttgtaattgctacccctaacataagttagggacttacaatcataagccttaaagggatctgaatataaataactagcacagtaacatttttttcccctacttaggtaatgttatgcatttaagcaagcctgattttgccagaccaaagtagatgtcttgtttagcactcttttctcacgttttatattgtcctgggaaaagcctggccagaagaacaaagttactggaagtagttatgtcaggtcatcagggtccttgaaatgttggtcatcattttgaagtaaattgttgtcatgtcccagtattttctcttcccctttagaacagtaaatgcttttctatctttgatttcagtttttttatgaatgtataaaaccagtttataaatgaatagacctggtgaatattaaagtcatttcagattctcttcaactgccagtatataaaaatggattttcaaatagtgctaatcagtgggatacccttttgtttttcctcatgattttataaagatgtcctaatatgcaaaaataaaatgtttccccattcatttgttctttcaactttcccaaaggaataactgatattacatcttttttgaagaaaacattctaaagttgagaatcttgcctctcctaaaaagaacataaaataggtttcagaattcctaatttgtagaccataactgtatagagtgggtcaggttgctgctataatccatacatgggtgtgtactcagagaggtaagttttttcttttcttggttattctgattctgactaccacttcttcaccccctgaatcatttcatttaaataaatatggtcatttatcactattaagctatttatttttctcttagagattaatgattcatcaagggatagttgtacttgtctcgtgggaatcacttcatcatgcgaaatctgaaattatttcggaccctggagttcagggatattcaaggtccagggaatcctcagtgcttctctctccgaactgaacaggggacggtgctcattggttcagaacatggcctgatagaagtagaccctgtctcaagagaagtaagttactgatgtagaatgccagcatgtgggtatgacccttgatttctcttcttccaaatttctttccccacatggtctttctttatatcttattgaatttatatcctcccaaataaacatcttttgcttcatatatatgccatgttagacatagcttaaatcgtaatccttctttaactctgctgctattttaacctaagtcagtagaactctgaccttactttttgagtgtgtgccgtactttttaccctctttgtcatgcaaattctgtttataagagtggttttttttttttttttttttgagacggagtctcgctctgtcacccaggctggagtgcagtggtgtgatcgtggctcactgcaagctccgcctccccgggttcacaccattctcctgcctcagcctcccgagaagctgggactacaggcgcccgccaccgcgcccggctaattttttgtatttttagtagatgtgcggtttcaccgtgttagccaggatggtcttgatctcctgacctcgtgatccgcctgcctcagcgcccggccaagagtggtttttaattgggaatgaacacgaaagttgcccatggagctttctaaaagtttgagcccacatctcatgtcaactaaatcagaatctttagtgttggctcctaactatatgtactttaaaaacctctgtgggttggttttgatatggtcccttgattatgttcttctactaatacattttaggcagttacatcctttagtgccttttccccatactatagaaatcttagaaaagcatagctattagcatcatattttagtggacaattttaaagagaccaggcttattgtttttgtttttgtgtttgtttggcaaaaaggtcacattacctatttttcttgttagagatgacagagtagtgatatttctcaaatgaaagtttggattttcatctagaaaaaatatttttgaaagcttttatgtaataaaagaagcattaaaaagtatttctggaaatgttatcaattattcttgaaagtagactgggttaatttgcttgtgtttactttggtgaaaggtgaaaaatgaagtttctttggtggcagaaggctttctcccagaggatggaagtggccgcattgttggtgttcaggacttgctggatcaggagtctgtgtgtgtggccacagcctctggagacgtcatactctgcagtctcagcacacaacaggtaagtggaagactccagtgaggggggagtctcaagcatcctcaaataggttacttgctatttgtggaagttttcaaatcagtagccataatagttacacttttgctaattaatttttgcattatatatttctttatttaaaaaattgttaacatggctttatctatatgttaagattcttctaaaactgagttttgtctgctgcatctattaatcagagtgatcagaatgttccaaatgagaatatatttttttaaaagttaaaactggctattcttatgtggtgtagatcacctcttatcagaccctcatcttgagttgcaacctttgtttctcaatttaggaagtctttgtttatctgacttagattttctgttatgaatgttgattggctaaatttagagtccctgaagtctaggcactaaagtaaatacattgtcattacctgcacatgtgatgactgccagtagagctagacttcaagcaattgcttctttctctactttagtgtatagttgagtttctgatttctatcctcaccttcttaacagcaagggtttcaaattacacttggctgattctttaaatcttcttccattacttcattagttgtgatctccttaacattgattatgtcacagaagttagagtattactaatagtaggataatgatagcagcttacatttattaactatcatgtgcctggcactttttaaagtgcttttcatgcaaatttatttaatcttcaccatgaccttatgcagtaggttgttgtttcctattcttcagaagaggcagttaaggcacagagtgcttaagtaattagaccagggtcacacagtaatcaaatggggtttgaccctagcagtctaaatctggcacctctgctcttaaccattccatttagtacaatcataaacctttacttgcagttcatggtgggaaatatcaaacttgtcatatacagcttgtttttttttcgtatttgaaagatagatgcttttactttccaaacattttgtagcattgtttcctggttactgagctcttccagtctatttatcttcatttaatggtgctgattctgccctttagtggcttctcaattgtctgaaaggtagagcccactattgtgccttataagcccctttcactatctgttccccacattcctttttagcctcatccccccattgttcctgtgtgtacgtaaaccttatgttttagttgcagctgatttttaactgctcttttttctggctttgtgcctctacactgtgttttcttcctggtctctctttcctgtccttattaccactctttgaaacacgtcagaaaaactttttctggactttgggccacttgtcattccctgtgctgagacgcattttgctttccagagatcttggtcattgctgttatcctctgtagggtcttcttttatctccctcgtgagacagctctgggaagaaaaagatatttatttctaatccctgtgcctaataacaggtctattctcttgatatccattactgaagaaatgtttgttgagtaagttcttgttttaatttttaaatataaatttttaatttttatgagtacatagtaggtacatatatttatgggctacatgagatgttctgatacaggcatgcagtgcaaaataaccacatcatggagaataggatatccatcccatcaagcgtttatcctttgtgttacaaacaatccaattacagtcttttagttattttaaaatgtgcaattactgttgactgtagttaccttgttgtgctatcaaatagcaggtcttatttattctatttttttttgtacctattaaccatcccaacttccctcagcccctcactacccttcccagcctctggtaaccatccttgtactctctgtgtccgtgagttcaattgttttgatttttagatcgcacaaataagtgagaacatgtgatgtttgtctttttgtgtctggtttatttcacttaatgtaatcatctccagttccatctatgttgttgcagatgacaggatcttattctttttttatggctgaatagtactccattgtgtatagtaccacaatttctttatccagtcatccattgatggacacttaggttgcttccaaatcttagctattgtgaacagagctgcaacaaacatgagagtgcagatatctcttccatatactgatgtcttttcgttttgtttttttaattgttttgattgaagttgcagtcagtttttactgagatgctagtgtttgaatctctcttttcaattttctctgtctcagctggagtgtgttgggagtgtagccagtggtatctctgttatgagttggagtcctgaccaagagctggtgcttcttgccacaggtaagcttgttactggtgcctcactggcttttttaaaacattattccagatgtcttacaggcttcatcagctttaggctgcttgaatttcaaaaaatttctttgaaccagtataataccaattatgaaccagtataataccaattatgtatgtgtgtgtgtatatatatataaaacgtagagtgatttttttttggtgactgaagttttgcctcttagtctatcattataaaaagttgtttcatgtaactttttaagtctttgggagtaagaaacaaagtcataaaacttggggaggctgctaagtccccagttagagttaaaaatgtcagcaatatgtattttaacttattctaagagttgctgtatggacacattctaaaagcccttcttgggttctgttgctgtttttcccctttaagtctcatcattccagatgagtttagtaaaccagctccactgatgacatttatatttagaggtatcttggggacaaggagtgttgaagttagtggaggagggctttgtggacttttaagttcaactgtacacacattaatagctgagcataagcaccaggtgacttatctagggaaagctttttggggttttttgtcattgttgtttttttaagtcaaagcattttggatgaattctgtctgctctgttcagactaactccagctccttagcttacagtgccataggtacttaggaatggcaaatttgttacatgaaaacaaaatcatttttgtttgtgtttctctaaggtcaacagaccctgattatgatgacaaaagattttgagccaatcctggagcagcagatccatcaggatgattttggtgaaagtaagtatagctttgtgcaatattttgtgacctacgtttcttcccatttttgaccatttccttgtgcactaatagccatgtcattaggccaaagaactgtgaaagttaaacccccagctattaaatgtctattagcccagttccttcagcccatcccaaatcttaaaaggcctactgatgcctctccaggtctgagggtttaaggtcacttagatagttattacccaaaccctaggaaagtcttaggctgggctttcagtgaaagggactgtacaaggtagtatttctgggatacagttttagggagaagaaaagaagaaagatggaatagaaggctggtttttgttactacgattagatccaatctgcatttccatgggaacaatcagattattttcttgctaaaatctagccaaggtcatctgggcattaaggctgtgggggtattgaagggcagtgcaggagaagagagacgcttattaagcataagctttggccatcttgaagtcacaaagtagctggcctgattgaagagggatggggaagaagatgttccaacttctgttatggtctaacttcctgccttcttgctccatcaactctgagaaatcatttagacaacttctacccatttatttacaaataatgtatttgttcagaaataattttggagggctgggcacagtggctcatgcctgtaatcccagcacttttggaggatgaggcaggaggattgcttgagcccaggagtttgatactagcctaggcaacgtagggagacccagcatctacaaagaatttaaaaattagctgggcttggtggtatcagcacagtaatgacatgatgtgcaggtactggggtagcataagggaaggaaacgagtaactagagagggatgatttatttcccctaggaggccaacttgagctgagtctcagctgaattggtgttgggtaggtgagggataagggtggggagtagtcagctgaattggtattgggcaggtgagggataagggtttggagtagtcagctgaattggtattgggtaggtgagggataagggtggggaacagtccaagcaagtgaatgtgtccatttcaagtgtccatttcaagggagggttatttcatagaaacattgtgggttactcagggaactgtgagtaattcagcattgctgaagtggcagaatgtgagtgtagaatgaaataaatggaacagatttgattgagtttgtagtagggaatatggacattgagttatagttgatcagccattacaagttttgatgataagaggtttaaagagatttatttaatagaaagatggctcgtgatggcatatttttgttgtttttgtgtgtggagagggaagagatgagaggcagggtgatcaggtaggaggttgctacaggaatccagatgaaagataaggaaggtttgtgtggggctagaagcaggaatcattcaggaaaaaacttgattcacaatgaggatgggagtacattttttagaattagctgggaaacttttttagaatatatgtgcatgattccccttctgccctaggccagtttgagaaataccaatttagaaagtgaaataaataggctttgcgtatgtaaggtgaataagaaaaagttgagcaggactccagccagaacctcaggtgttgggaataaagatgccagtaacagggaagatggagaagtgctggtctgtaaggggtgggtggtgagatctgttttggatttgttgaaggaccatatgtgattgccatgtggagtatgcaaatataaggctgaagctcaggagaggccagagctatggactgagagtagtgggtatgtaggaaattctgacagttttgggaacagatggactgtctcagggagcagatgctgtacaggaagagtctagaatccagggtggaactctggggcatccagctttgaggacagtcagagagagagtaacagcacacagtatactttgggatgggaaagtgctctgggcctggtgtttcccactgactttttcacacaaatcctaatgcagtaaatcaaaggaaatgtaggccaagttaagatcttaggtctcagaaatgtgtttctcagtacaaaaaaaaaaaaatcattctatggagtgatgaatatttttcctctatcctggggtcagtagacttgttctgaaaagggctaggtcatgaatatgttcagctttgcaggctgtatgatctgtgttgcagctgctcaattctaatgttgaggtgtgaaagttatacatgatacataagcacatctatgttccagtaaacgtttgtttgtaaaagcagatgtaggctgtagttttgcaaatccctgctgtaaccgcatcatttcttgtcttccattggaaaagttctctttcttcattccttggtccttaatctttctgtggaaacttgcagatagaagcctgggggtttgcaccaggatagtcactaccatttgtacgcagcagcaattgaggtactgtagcacttggatgtgagcagacaggaaatggtcatatggacccataatttataggaattgcaaacagccctgcttcatcagaatcagaatcaatggcaggaggaaagtattgggtcctggattaggtgatgttttcaggaccatctttattgtgcttcttgcaaatggatcctacctccaggaacagaagggttgtgttgtttcagcaactctgcctaatagtttatataagagaagtgttacgatctagaaagaaccccagtcagcctggaaggcagaagacctgtgttctaacttttggctccaccattagggagggtctcaatctctaagtctatgtgaggagctgttttgtgacctgcagcccctctatcaccagtgagagcttgcaatcagaattttattcccagttctcatcttggggttttatgttccggacatattttgtaaactctttatgtttcattcttcttacttataaggtgagggtgagatcgctgacttgtgtcatcaaagaaacttggaatatgtaagatggcagtaaaatgctttccaaaataaggaagggcatttcaaattcttcaaagtcactgctgcatataatatgaaatgggttttgtttgtttgttttgagatgggggtctcgctgtgttacccaggctagagagtgcagtagtacaatcagggctcactgcagccttgaactcctgggttcaagtgatcctcctactttagtctcttgagtagctgggaccacaggtgtgtgccatcatgtccagcttattttgtatactttttgtagagatgggtgtctccctatgttgcccaggctggtctcgaactcctggactcaagtgatcctcctgcctcagcctcccaaagtgttgggactataggcatgagccaccatgcccagcctgaaacataggtttctcaaatattgactgctggtcaatttattgagaggcgttagaggacctgagtaattgccaatgactaacttcatgaagaatagcagtgaaactgtttttgtttcatttcatgtggcttattagttgtcttgccaattgttctgtaggcaagtttatcactgttggatggggtaggaaggagacacagttccatggatcagaaggcagacaagcagcttttcagatgcaaatggtaagtttggtttgatggataaaaagccttgactggaacaaatgtaagtttgccacccaccaggaactctttggtgtccacttagatgccagtaatgaacagttctcttctgctttagtaaaactgcctagaaccttcaggaaatgaatccctctagaaagatcctttttttccttgttattgccaagttgctttgtgatttattttcatagtagcaaataattataaccaatattcatcacccagtttaaaaaataaaacatcacagacaaaggaaaccccctgtgtatcccgtcccgatgtccctccccttcctctccagagagagctgccatccttcattcacatgcatgttctcatacttttcccatatatgtgtatattagatatttttctttttctgttggatgaaactctttgttttccttacttctggattggaaaattctgaagaccatataatgatgtcttgatgactcaaggcaggactttttaatcttctaatgtaggcggggcggcccctgaaggcagaggtgtgtggacacaagaagagtgcagactcttggggcacctggggaagtagtgtccgtgtcacattaaattcatttaaactcttatattttattttaatttatacaatatgaatattttttaaaactatgaattgaaaagtattacccttgagtaaaattaatgccccaagaagatgtgccatatttaccctctggcacactaccaagtacccccaggggcattacagatctctgttagaaaagtacagattacattatcctcataacatttagaagctatgagaccttggcagggaagtttcctaatgtttctgagcctcagtattctctgtaaagtggacaacataatgtctccttacaagggttgagatgggcaggtaatagcatatataaaacagctatcatagcatcagcacagtgtaggcactcaaatggtagttgctgcttttgttttagtagacaaataatttttgaaactttttaaagcgtagtttttatttcaaaacaactttattgtgagtaaaatatgcatagtgggtctaatttaacattctgaaagctattgacttattagaacagtaaaggattattagagggcagaaacatggagtaagtactctgagacacaaccttgcttctttgggggtgatccactacaactgcccagctttggacaagtggttttcatgtccccctgatttttaagtgattttttttttttttggcaggacttaaaaggtatccttgactaaacaggaacttgaccaagtaaatagttggtgcaatttgaatattctttcttgctataagcaacaagtaaattatggtacagctttctaagaccatatcttttcgatttaaaaatagcactttactcatacatgttatgacatgggtaaacctcataaagattatgctaagtgaaagaagccagtcataaaagatcacatataatatgatcccatttgtatgaagtgcccagaaggggcaaatccacagaggcagaaagtagagtagtggttgggtagggctgtggggtggggtggggaaggggtgactgctaatggatatggggtttcttttggggatgatgaaaatgctcaaaatttagattatggtgatggctattcaactttgtaaatatactttaaaaacattgattcttaccactgagtttaaacaaccaaaaaaaaatcccaaggtgcattgaattgtgtacttcaaatgggtgaaccttaataatatgtaaattatatcccagtaaaggtgttaaaaaatagtactttaaaggaatctatggtagttttgaaaataaggcagttttccatactttgttaaactctggagaagatgacactttactactggtacctgctagagtaagacttatctagtattaacaaaattagggtttattaatggtataggatgatccaggtaatgggggaaaaaaaccgagcatcctgttatctaatgtactatccagtaaactactctagctttttttcatgaactttttctaaaggctttctagggcctcgtcttggtttgaaagttcacagctacccttcagaaaagaaaacaaaaatccatggagtaggcagatacaagtactcatgtgagcataatttactttgattttttaagttgtgttattctagccctcagcctgttccctgcctgggctctcctagtgcccagtaacactgattcaagaggttgcatttagctgggcacagtggctgatgcctgcaatcccagcactttgggaggccaagttgggcagatcacctgaggtcaggagttcaagaccagcatgtccaacatggtgaaatcctatctctactaaaaatacaaaaattagccaggcatggtggcagatgcctgtaatctcagctacttgagaagctaaggtagtagaatcacttgtacctgggaggcagaggttgcggtgagccaagattgtgccactgcactccagcctgggccataaagcaagactccgtctcaaaaaaaaaaaaaaaaaaattgggtgagagggaggaattgaggaggataccaagggttgggcctgaacaaatggaagcataattatatgtagaaatttctatgagctactcttctagaatagatgactcaataataccctgcttgccatctacgttttctgtccttaattatttccagttctatttcatataatgcctatttcaggccttaacccttcagtaaaggaggtttggtttctataccctaggacagtttcattgagaataaattttgttaggctacctatgtattccctactgtgcagactacagtacagtactagcagaattcttaggctgttactagaatatgatgatgaatgcccgggtggtcatctgtctcccacccggtagagttggcttcaggattgagatacacgtggccctggaggagacgtttcttcccgtcatgctgcagaatgagaacatttccatgttttcgtcattgtctgctgctgcctttaccacctctgtggctcctccctattcaccttgttcacatcttaactcatctgtgccctgttgtgaagcttacacaatatgtaaacaaaactctaccctgttggacaaatggaacacttgtttccttgttgtagttacctgataggttccttagctcattatattcaggatctagatctgtagctcttttcctcttttgctgttctcagaggccactttttttttttttaatgccgaaaggaggattttgtttgttttacatttttttcttctttttgatgatttctgcgttctaagaaccaacccttggatggtttctgattctagaggcaggctttcaaagtagcttaaacctcttaaaaaacatctgtatctagtggtctgaggcttgtttgattctgggatacttaaggtcccccagtaatattggtgtttgttcccctttttagcatgagtctgctttgccctgggatgaccatagaccacaagttacctggcggggggatggacagttttttgctgtgagtgttgtttgcccagaaacaggtatggaaatatattgcagttaaacaacaataaaaaatttttatcttattaaaattaaggaaaattttctttcttttgctttgagtagggtattaattatacatatgaggcaaggatgtgctgctttaaatgtgaaatgaggttagagttaagaattagaagagtcctttgaggccatttggtccatcctcctacctggtggacacaaatttgtaacaaaattaatctaattggctatgtaaaaccatggcagtttttatttgtaaggaaggtgtttgaatagttctgaattgacaacttttatcataatgttttaagtgtgtatgtgtgtttgactccactcccgcacaggggctcggaaggtcagagtgtggaaccgagagtttgctttgcagtcaaccagtgagcctgtggcaggactgggaccagccctggcttggaagtgagtgggagaagaaaccttagagaaattcttggaaccagagtagaggtggtggtacacatggatacagatgatacagatgtttgtgtaacacaaaaggatttttacgtttcttcatttggttataaggctgtatctatctttgtttcttcttttttttttttcttattccctgaagtctgaattcaactcgaatagtagattttacgcttcttcacagatttcattgttccaaggccgcatatattttgcattcctaactcttaaaaggctgtggttttaaggcagggtatatatgaagccattgtacagagcagaaaatggtgtttagaagggaaggcccagtttgcaaggctctgtggggcaaatggtgcttttgtggaaattagggaaagagcctccttccttggcacaaaattcctacagcagaggatctgcttgccaaggagcatgcaggctggattcagaccctgctctttccttccattctcctccttggcccagtacccttgtgcaggttacaatttgcctgtcatatgtggctgcctgattttagatagaagatgtatctcctctgtttcggtgatatctgttgtatgtagacctcttgtttcccaccagtatctgaatggtattatatgatagagcagaagagaaatgtatttgaattaaaaccctagagacaaatatgaataagatgaggcaattaagatgttttcaacatttggtgaagtcttaaaaaagacctactggagcatagaatatttgctgaagttgtataatggaaggagaaatagattttgatttttaggacattatacctggaatggtttagataacttattatttttaaagtcatccaaatgcaatgtaaatatgtaaggttttgtgggcaaatggagcctctgtgtaaaacaggaaaaggcactctttcctctgggcaagtacagtcccacagtgggatgaaccgctcgccgagagacaagggacacatgggatttaaaacttccttggataaagatattcattaattcgttcattcattcattcatgtttgctggaaaaaaaactcttctggattttatctattctttagttaggtgagctttcgatattgtaacactctgagtttgctttaagaccctcaggcagtttgattgcatctacacaagataaacccaaccagcaggatattgtgttttttgagaaaaatggactccttcatggacactttacacttcccttccttaaagatgaggttaaggtaagtgcctgagtttgtttcaccctcgaatgtagaggactttccatagctatagagggaattttttttttttttttttgagatggagtttcattcttgttgcccaggttggagtgcgatagtgcaatctcggttcactgcaacctccgcctcctaggttcaagtgattctcctgcctcagcctcccgagtagctgggattacaggcttgcgccaccacagccagctaattttgtatttttagtagagacggggtttctccgtgttggtcaggctggtctcaaacccctgacctcaggtgatccacccgcctctgcctcccaaagtgctgggattacaggcgtgagccaccacgcctggcctatagaggggatttatatttgatatggatatataaatagtagctttagagtaaatagtaataaaaatggtggcttcctagaactgatttttatttaataaaatattgtttttccagtgattttgcaaataatagcatttgtcccccaccttagataaaacagaagtaggaaataaaaatgctagtttttattgtttattttgacaaaagcataatttttccagtaatgaagatgtttttcatttataacatttaaatcttaagtggtttgtataccattaagattcttgctgaagtgagaacacatcaaatggtatctctgtgtaaaattttaaacatcctaagttgagagacgagtttaatgaactcccatgtaactattactcactttcagtagataccaacattttgcaaaactattttcatcggtccgcaactctttggcctatacatatatatacttacatatatttttatttcctggagttttaattctagaaatcatattttcaatatttatttataacagttaaggacatttttctttacataaccataattctattattacatcttatctctgtgttgtctaacacccagtccatattccagtttctctgattgtctaaaaatgtcaccttgtatttggttaagtttcttaagtctcttttaatctttaagcataatgtatttcttttttttaagtcctctacataataatgacatattttacagatttgtttaatgcctctgtaggttagtgatttacagctagggatgagctcaggtagtgggattatttgatttgagagaggaaatacagctattataaagatttggaagtaaatccataactgaaagccaatgacagatcttttttcccttctaggtaaatgacttgctctggaatgcagattcctctgtgcttgcagtctggctggaagaccttcagagagaagaaagctccattccgaaaacctgtggtaagacagctgtagtaccccagccttctgccccataaaacgtagttgaaagtagacaggtatgggatttccttcatcccttctacttagtcccttagtagaatcaaagatgctgaagtgggtaggtggaaatgggggtggttaggttttgattgattgtggatttcagtcatgtattggttggggttctctagagaaacaaataatacatatatataattcgtccctcagtattctcgggggattagttctaggattgcccatggacgccaaaatccacacatggtcaagtcctgcagtcaaccctgcagaacactcagatatgaaaagtcagccttttgtatacttgggttttgcattcctcaagtaccatatttttgatgtgcgtttggttgcgggtatagaatccacaatatgaagggccgactgtattcattgaaaaaaatacgaatataaatggacctgtgtagttcaagcctgtgttgttcaagggtcagctgtacttacatagagagacggtgagagagggaatagggtggggcgggagggagagagagtaatagagtgtggatagatttactttaaaagattagctaatgtaggggatggcaagtttgaaatttgtgggggcaggttggcaggctggaaattcaggtaagaattgatgttgctgtcttgagtatgaaatctgtagggcaggctggaaacttagggaggatttctgttacagccttaaggcagaatttcttcttttctgcgaagcctcagtttttgcttttaaggtcttcagctgaatgaatgggaccttcccacattatggggaataatctgctttccttatagtcagccgattataaatattaatcacatctacagaataccttcacagcaacatctggagtttagcagatagctgggtgccatagcctagccaacttgacacaataaaattaactgttgtaagtcatcacgtgctttccctagtgcatggtattaccacagaaaaaacactaaccaaaggaattctgtggacgtgaaagaagatttagattaagcgtaaaagtaagaatatttttatagcttttaaaatgtataagtgtgtggttttaagtattaaataatacttgaaaatgttagaaaataagatgagaaaaaaatctcatagttctaccacttcgtaataatcactattcaaattttcttgtcttctaggtttttcatgtatatatctcagtatagctatcatcttgtttttgttaaaagtgtagtaggtatgggccaggtgcggtggctcatgcactttgggggcccagcactttgggaggccgaggcgggcggatcacgaggtcaggagatcgagaccatcctggctaacacggtgtaaccccatctctactaaaaatacaaaaaattagctgggcgtggtggcaggcgcctgtagtcccagctactcaggaggctgaggcaggagaatggtgtgaacctggaggaggcggagcttgcagtgaatggagatcgtgccactgcactccagccttggcgacagagtgagactgtctcaaaacaaaacaaaaaaaagtgtaggtgtgatacatctgcatcattttaaattgctgtataatactcgtttattctcgttcattaaatctcatgctgttagacatttacagttttgtcatttctcattattgtaaacagcaatgcatggtacatttttgttcataaatctttttacttgattattttctaagtagctttcaaactctttaatcagtagaaccccccccccctttttttttttttttggagacggagtctctctctttcccccaggctggagtgcagtggcccgatctcggtcactgcaagctctgcctcccgggttcactccattttcctgcctcagcttcccgagtagctgggtctacaggcgcccgccaccaagcctggctaattttttgtatttttggtagaggcagggtttcaccgcgttagccaggatggtctcgatctccatctcgtgatctgcccgtctcggcctcccaaagtgctgggattacaggcgtgagccaccgtgcccggcctcagtagaacccttttaactgcaatgttaagaaactcattattcattcaacacaatagttcttaaccctggccacacctttagaaaaaaaatgatattcaggcttcatctcaagagttcagttcagtgtgttggaatggagattatacgtaagtatttaattaaaaaccaaaagcccccaagtgattttaaacagccgcagttgagaaccaccgattaaccagtgtgtcaagggatggcactgtgatatgctgagcataaaaatattgcacaggatgaaaccctgtctctactaaaaatgcaaaaattagtccggcgtggtggtgcgcgcctgtagtcctagctactcgggaggctgagacaagggaatcgcttgaactgggaggcagaggttgccgtgagccgagattgagccactgcactccagcatgggtgacagagtgagactccatctcaaaaacatgtatatatatatatacacacacacacacattgcacaagaacagccacaacatctgtgctcacagaacatcagcatgtggtctaacttcaaagtgttgtaataatgcggtttgagactaggttatgtttgctgtgatcactaagttaagcattagtgagcaaggagattgagaaaatccttaatataaataatatttcttaatataactataattcctaatataactaaggtcttaatttatatgtcatctgtttagtaaaggttggttttggcatgattaagtcttgcttgcttaatagatgttggaaggataatttcatgcttatcttctttggacagctgaatcaggattaatacccagatagccttgaacataagtgcttgcaaagcacctgaaagaaaataagcatcttaagcccaatacaacacaatgatgctagtctagatcttggattaagtgttttaatacttttactctaattgccaagttatcttcttcctaaatcttcatgagaaaacccactaaaagaatgctttttcctggtagccttccattgtgatcataaagtttggaagtaaagttgaaaataaacatgtgggccaggcacggtggctcaggcctgtaatctcagcactttgggaggccgaggcaggcggatcacaaggtcaggagatcaagaccatcctggctaacacggtgaaaccatgtttctactaaaaatacaaaaaaaaaaaattagccgggtgtggtggtgggcgcctgtagtcctagctactcgagaggctgaggcaggagaatggcatgaacccgggagatggagcttgcagtgagccgagattgcgccactgcactccagcctggccggcagagcgagactctgtgtcaataaaaaaaaaaaaaaaacgaaaataaacatatgaataaaagttaaaaatagaaaaaaaacaagaaaataaacatatatttctgaccttattgattcttgatattttatctgcatggaaagctattttttggcagttattattgttcttattttagagacgaggctgagcaggaagggtcctttgaaaaagaaaagattgcccttgaacccctctggcaagtgggatgaagtctgcttcccagcctctaacggccttcttttcattttcccttgcagttcagctctggactgttggaaactatcactggtatctcaagcaaagtttatccttcagcacctgtgggaagagcaagattgtgtctctgatgtgggaccctgtgaccccataccggctgcatgttctctgtcagggctggcattacctcgcctatgattggcactggacgactgaccggagcgtgggagataattcaagtgacttgtccaatgtggctgtcattgatggaagtaagctcctgggaagtgtgtccatgagcctgcaaggggtcctgagcctagggcctgcagatgtggtggtttgactggaacagtggggaatctttatttgttttggctgtttgggttacttgtttttttattgaatgggatataaggtggggtatgttctctcctgagaaccattgtcccccctcccccaccagtttcctgttatactgcatctgtggccttcacacgtttacttgcctggcctttgaagacactgaaaactttgactctaggtagagaggatgacaacagtacagtcttgtgggattgggtgtgttagctttatctgtttgccctgacacagatttataattgacccttataccaccccacttgtgttgctttgtttcctgatacaaatgcttgctgatatatacctctccagtatgttcagttcatgcataaacgtttgcctaatatgaagattaggtttatattttataatgaggtagaaggtttttttagggggtggggtgggaagggcaagactgaagagtgaagtagtcaccttaatgaatagtttcattgctgatatgaaagggagcactggcttctaagattgtaatgtgaggtggtatattaattcatattctgtgtaatattctacataatactgattttatagtcatgtattctatatagagaacttaatcagatctgcgttattaccaaatccacacataggaaagtgctttaaggattttgaaagtattaattcccttggtttagtgtggcttggttgcaggcccaggtttaaagctagaggtctgacctcttggcctttttgccttagtccctggcacctgaaactccaggtactgagatggactcccctaggcctagaggtgacaatagccaattatggacagaacccatgacatttccccatcccacactgtttttagacttgttcctgagaaaaacattgaaagttatttttttgtgaattgccattattgtttagatatactgtgatgttcagatggcttatcttacaaattgaatatccctaggtctaatcctcttctttctttttcactgcagacagggtgttggtgacagtcttccggcagactgtggttccgcctcccatgtgcacctaccaactgctgttcccacaccctgtgaatcaagtcacattcttagcacaccctcaaaagagtaatgaccttgctgttctagatgccagtaaccagatttctgtttataaatgtggtatgttataaaacttttgccaagatgttctgaatcaagtcccttctactcctacataaaagcaaattatagtttggtgttgccataggtctagtgtttctcaaaatttttaagtctgcagttgatatcattatcattatgatatttaattgccttgggtttttgttttttttttttttaatcctatactggtttgtacgagccattccttttcccttactgacttgaagagtcagttatttaagaataacattggactctggaaataacatagtatgttatacattgttaacatgttttactcttttcatagcctttacacatattttcagttgatctcatccctcctaggagctgtgtcagagatggggttttcctcttttgtagatgagggaacacagtgtcagaggttttgtaatttgtttgaacaagaatggacaaggacctcaacacaggtgttctagctcctaatccacttgtcctgccacagccccattgctgtcagttcttcattactttcctgatgtgctggagaatctgaaatttgtttttacttgtgagttctgtggttatgtcataaattctgctggcatatggcagtgttagccttgttttcaaatatcttttgaattctcagaaaaagcctagatagttgccaagagagaataatcaaaattaattaatttaaatgggaagtccttactttcatatcagcttttctgttaagtcagcagcccactgtgtacatggatcctatctggatgtatcaccagtttctctgattatagtttcagtgtgtaaaatgctgttacagtcctccttaaacttttcaaaatagctttaaaaaaaagtgcaaatatgttcattgtcaaggcaaaaagaatcagatgtaagcttttgtgggacttaactgtatgatgctaatgagtttatatgtcactttatgatgtatggtatgttttgttctgcattcacttaaaaaatagctttatatcattcatctatttaaagtgtacaattcaatggtttatatgtgtgtgtatgaatatatatacatatgtatatgtatatatatgtatattcacagagttgtacagccatcaccacgatcaattttaggacgtttttatctcctcagaatgaaaccctgtaccaccctgcattcattttacttgagagaaaactccctgtgatgagataggacaggttgagagctccacttttgaaagattgttcggcatcaatatgtggggttggccataggtcaggggcacctggaggcagagattctagttaggagaagctgttgtcaagtgtccaggcaggagctagcaagagcttgagccagagcagtgttcatagaaatggaaagaagagaaagatcataacaaatccatgaagtaaaaaccctgagaagttaaagaacccactggggagagtttggatataagagaatctggaaaaagagatcttggactggaacaggtcagggctccgtgcccaagtggaagggaaattaagaacttggagtcaagtggtagacatttgagtggtgtggagacaagttcgttgccaaagttttcaaagatggtgtttgatgcatcctgagtatcactcctttttccccctcattgcttcttgattgtttattatatgccaggcttttttctagtacttggcttgttgtactagaaaactagttgtactttgtctacaacttgttgttctaggtgtagacaaaagatatcaattaaatatgatctatcagatggcaagtgctgtggagaaaaattaagcaaaataaggggtagggagagcttaaggataagggtttacagggggaaggtgtctttcctatttagtgtgatcccaaaggcctctctgtgaaggtgacattgaagcagagacctggtgagaatcacagtgggagccacgcagacatctggggtaagagcgtcccaagcattctatgcttgaaggcaaagaagaaaaaagaaagagcgttccaagcagagtaaaaagcaaccaccgaagtgcctgttgtgtttaggaaatagccaggaggccagggtggctgcagcagagcaaaggaggggaaggtggtgggtgagttcagagtggtgatgggaatctgctcttgtagggccttgcggcttttactccgagtgagataggagccaccagagggcttagaacagaggagtgcagtgttctggctgaattttttaaaggcttgcattggctgctgtgcagtgaataaactggatgaagaatagaaagaaaatgtcttttaagcaggtgcttaggactttggagaatttgaggatattgagaggtggttgaagacagtggaggaaattgtccacagcactgggctgagagggtagccccttcacctggtcttgctgagatgtggcctttgtcagggaagattatgactgatgtgttcttaagaggaaagcagaaattttaaggaggttgagatgtgattattttctagattgctgtttgccttctagaactcattaattgcagacaccatccccttagtattaggtgaaatcttataatttacgatgataatatttgcatttttgttttccaggtgattgtccaagtgctgaccctacagtgaaactgggagctgtgggtggaagtggatttaaagtttgccttagaactcctcatttggaaaagagatacaagtaggttcttaattatcttgggcttctgggaacagaatcagccagcatgcagtcctaaattcagccatctgataacagttctatgcctgttgctgagtggaacaagaaataaagacaacacccaggccctgactttcggatctgattggagaagccagtcatgtagtttgtctgaatgccatataatttgataggtagcaggagagcatgagttgtaagccagcctaggacctactcccaatagcgcttggttctccaggaaaaatcatgtgggaaagatggagatgacaatgataaggcggagctgcattctcttacataaatggggatgtatgggttgttaacatggatgacctaatgcagcctctgtctttgctccatcccagaatctagaacttctgggtgctgtgctttgaggctcctgggatggaaatcagaatgcattcttccattgaaacagtattgtaaacaattggatgttattgaatacctcaggtacactataggcatttgcaaaatgacctagaaaccaaattataatgccacatctgtgagagaacttttttaaaaagtaccacttattgagtacttacagattaaaaaaacaaagtgtagaggttaggtaacttacccaaggtcatggacctggtaactagagaatttagggtttgattctattctgtttgataagtccatgttcttcattactaaactactctgcctccagggaacatttattgttagattaatagaaataattaactgagtacaacaaatagcagaatttaataaataatgtttcttaaatatatgtgatatatttaataaatacagcagaagtgttcaacctctgtatgattttgaggctgcctgtataatgcttagtagtttttaaagagcatttacatgcattatttcacttcatagacttgaaaccactagagtagagatagaggacaaattagaaagtatgaggcagtttagaatatagtttcatttaaaaaaaattgatggggataatgccaattcgtctgagatttcacagaagacatgagtactcatcgtgatcttggggaagggataggtttggggttggcaaagaattgggaacattgggtctggtggggaagaaagtgtcagtgaaaaccagaggtgggactgatcctccatgggatactctatgtgaatgcaatggagagcctgagtccggggagagatgtttgaggaggaagatcaggctagtgaccaacttcttcagtgggagctgcggatttgccacctgatctaaaaggcaggaagtagccattgtcggttcctacgtgaggtgacaagaacagtgcgctggtcaggtgtataaatgctaccaaagaatgcattagagacatggagaccatctctcaagctagtcagtcagtttaatgtgaggtgcttaggaaaggacccattctactgcaagtgacatacctgccagagcctggtttgaatgctggtaagtcatggcagtggaaaagctctggggttcattagtgtagggactagggctggtaattttcttgtgtagtcagtttcctcaagtgttctcttcaaatttaaagatttcagggtatgagaaatttagggaaaatataaaaacgtattcttaagccagacaaagattaattttagattttgtagtatttggtagtatctcaggttttgtccctccaaataattaggagtggactgtatacaagatgcttcagtcttccttcatccaggaacgtctcagtggtttttaagttttattcatgtcttggatattcttcaatatttacaatagaatccagtttgagaataatgaagatcaagatgtaaacccgctgaaactaggccttctcacttggattgaagaagacgtcttcctggctgtaagccacagtgagttcagcccccggtctgtcattcaccatttgactgcagcttcttctgagatggatgaagagcatggacagctcaatgtcaggtattgcagtttttccctgtactccacatgttaagcaaatggagttaggtttttgtcttttatgagcatacaacttttgacttctattgatcaaggttgaggagcagtagctttcttgttagacacacttaacaagaaggttaagtctagttatgagccatgtcaaaataacagaccaaaaatatatcaaaaagtggtgaaaaataggataaatattagtagatgaagcaactttttaaagatatgttaaatattttaatttagcatctacccacatttttccagcgtgattgttatatgttataattgattttaataactgtcaagcataattagagtggctaattctcatgggctaatgtgatgggaagaaattttgtataaatgcagtcatgcgcatatatgtgtgtgtgtgtgtgtgtgtgtgtgtgtgtatacataccttttctatgtttagatacacaaatacttgacatggtattacaattgcctgtagtattctgtaaagtaacatgctgtccaggtttgtagcctggtagcaataggccataccccataggctaggggtgtagtaggctacaccacctaggtttgtgtaagtactctatgatgtttgcacaatgatgaaatcacctaacaacacatttctcagacgtatccccatcgttaaatgatgcataattgcacatatatgctttgttttgatgtggtgacttcaaaatgcttcttccagcctcctcttctatatatcctattttgtacctgactacatttaccattagaaagtctctattcttctttgctgaaatttcactgttctctgggcctgagttttgttttgattcctgactatatcttcattatgtaacaggtttcagttaatgaatgctcttctgtgtaatgtaagccctgttgtatagttgatagcattttctagccagttcccagaactccttgtttccagtgtcaatacttggcacctttgtccactgacactaatccccagattaatttgtaattaaagccctactggtgagatttctgagaaacgttgttgcaaaattaggaacctttcctttatatatatacattacataaatttatagacataaaacattttaatgcagtcatttgctgctactctttgactcatagtctttcgtgatattttgaaaaagccttttgttaacatgtctaaatgcagaatatgttctagaaatatgtagcacttaaagtaagccattagattaccttttgaaaagcggagcaatttactaagtttctacttcttcagatttgaaattcttcatcattagcttgtagaggcaaaagcttgatgcagtcatctcatttgctgtaaaggaaatgagaagtcatttacagtatatttctactgctttgacttttatttctcaaaaagactgttttgttcatataaaatattaatgcttttgaggactacaaagtccctcgatttagtttacatttactttagcttatactttgtaaaaaatactcttctaaatgctttgtctgttttagcttacttatttctcataatacctctgtaaagtatatgccatttgcaccatcattttacagatgagacaactaagacatggagcagttagataacttgcctgagatcatgcaggtggagccaggatcaaatcccagcgagtctagctccagagtttgttctcttcttgacagataatttatcctcacaaaatttgaagcatttgtagaggaattccctattgttataatgtttagtttttttgtagattggttaaaaactttgaattaaatgttagcattaacatcatttgcttttatcactacttctttgtctcttttttctttttttaatcactacctcttcctcctcttttgagaaattctgcttccgtggctatggtccaagctacttgagaaggtgaggtgggaggatcacttgagcctaggaggttgagattgcggtgagctgtgattgtgtcaactgcatttcaacctgggcaacagagcaagacactgtccaaaaaaaaaaaaaaaaatagtgaaattttacttcgctccattgactcagggaaaaaatgtaatggtgataacaaattcccttcatctcattagtgaaaatccacaattttccatcaatcgatatgatagtgatagagatattgagtgtgctcattttcctacagaccagctgctttaactattttaagcagacagaaatgatattggtaccatccatgtctaatgaaggcaatactttgtaataagttgcagtaagttgtggccagaagaggaatgatgacttcacagtgtaaacaactaccttattgggtttgtggaaaatggtgtcatgtagcagatgtggctttatctgggctttggtttggagtagttttatctattcatctaaccgtctgtctctaagtgtataagtgtgtgtgtgtgtgtgtgtgtgtgtgtatagtattgggtgtgtatatatgtattttgtctacattgtattgaagtaggtagtgcagcatcaaaaggaaattgttgattttcaaaatcagtgaaatgtcactatttttgagaaaaatggtctgtttacactcccttctccttttttttgtcagttcatctgcagcggtggatggggtcataatcagtctatgttgcaattccaagaccaagtcagtagtattacagctggctgatggccagatatttaagtacctttggggtgagtatcaaggtgttaggaaagcatgttatgacttacatagatgcttagttcttaagaacatgtacttgtatcttgtcagttcaatattgattgtcaggtcttttaactaccctggaaaaccctaagctttagagtggaattggcaagtgtattctactcctgtttcctcttttaatgaactaacgtactcttaaaaaagtgattgatgactatcgcagggacaaaaaaccaaacaccgcatgttctcactcataggtgggaactgaacagtgagaacacttggacacaggaaggagaacatcacacacctgggcctgtcgtggggtgggggagggtggagggatagcattaggagatatacctaatgtaaatgacaagttaatgggtgcagcacaccaacatggcacatgtatacatatgtaacaaacctgcacattgtgcacatgtaccctagaacttaaagtataataaaaatatatatataaataaataatgccagcattagagaaaaaaagtgattgaaattgcatgttaagtgttttagcaaatgttgatgttgatggttttttgcaaagagcgcatcagctatttgtgaactagatctgtgaatcttgcagagtcaccttctctggctattaaaccatggaagaactctggtggatttcctgttcggtttccttatccatgcacccagaccgaattggccatgattggagaagaggtaggtgaacacggagcaggaaatttacttaaagtagttacccagggactgatggcattaagtagaaagagcgtgggctttggaggtggacttgggtctccactaaatgcctagacaatagtgggaaatgatctcactttcataagccacaccttattcatctataaaatgggaaaatcagtatctgtctatcagggttcagaagactaaatgagataatatatgtgattagcaaccttttatccctagttgtacaaatcattcaaagttaattttatttaggaggggaaacagaaatgtgatcttgagaatagttttagtagatttttattcaacacatactagaatgcctataattgtggtggatggtagaatgcagtggctggaaaacaaaaccgcttgactaattcctgctcttctggaacttgtgatctattaatttcaatgtaatgattccctttgttgggagtgtgatggaaatggacagagtatactggtagagaatactgagatgtttgaggggtaatttgaggatggtggctatgagaatgggagtcctgcatctggtggtccaggaaggcctctcggaggcagtgatgtgtgtgctgagatgtgaagaaaaagaaggctctgtctccaggcagaaggaacaacaaactccttgagcttagcaagagctcatcttattcaagggactggatggaagtattgtggctggagctcagtgacagtcataggagggaatttgggttctttaattgaacaaagattagaaacttcttgtgatttttaataacagagtaatgtgttctgcttcatggtttggacagtgattctggctgcccagaagagacttgattggagagtgacgagactggaatatgggatcaacaccggttgagtggagttagtgaggggaaaaaggagatgggtttgagatatgtgtaggagatggagatgtcagggctcactgatggattggatggcttcacattccattttgcactggaccagccacgtcttaggtatctatctttagtcctgattacaggaacttaggtgtgaaatcatagggtggtagaactatgtgatagaaaaggtaggtttaactgatttgagatagaattgcttgtgatttcagttttatttctttgcaggaatgtgtccttggtctgactgacaggtgtcgctttttcatcaatgacattgaggtatcaaggcttggtttggtgttggatccttttcacagtgttagctccgagtaatctagctagctttcacccatgcctctctggccttctcttgcaggttgcgtcaaatatcacgtcatttgcagtatatgatgagtttttattgttgacaacccattcccatacctgccagtgtttttgcctgagggatgcttcatttaaaagtaagttttcaatgtataaaacagaaatggtcccttctccaatgtcttttggagtcttgatgactttttgaattcttcatttattttggctttttatcaaggagtcctaggctggagaaaatctttagagttattttacttagaccctaatctcaacataatatctcagttaaatcattctgcactttagtaaagacatccaaggaagggagttccttccttaagcagcacattctaaagttaaaaacttttcaggaaattttattatgtaactgatctaatattttatttggaattactatgtagatccccaatgttttaccttctgtgtagtcttttcccactgtgcccaccctccactgtacatctgcgctccatctagtggtttgtaggatattggctgcattttgtcttctgttccatgccctatctatctctgtgtgtgtggcgtgtatgtgtgtgtggcgtgtatgtgtgtgtggcgtgtatgtgtgtgtggcgtgtatgtgtgtgtggcgtgtatgtgtgtgtggcgtgtatgtgtgtgtggcgtgtatgtgtgtgtggcgtgtatgtgtgtgtggcgtgtatgtgtgtgtggcgtgtatgtgtgtgtggcgtgtatgtgtgtgtggcgtgtatgtgtgtgtggcgtgtatgtgtgtgtgtgttccttattctaaaaagccaacttattttctttgcttccaacttggaaatagggaatctttctttcattgatatgattatagtacactgataatgctaagaaatagagaagttgccccaattcttaactgtgtttctccacatcatttgagaagctgtgtatgtgaatgtgcatgagggctctgtaagagagagggcaagttccagggatgagcgtgttcatcagcagggctgatagtcttgaggttcagtgggagagctaaggcacatggttgttatttgttctcttctatttcacataatgtgtgcggtttcaattgcagttaatggagagtggcttgttgtgataattaaggcttattagttaatggtgtgtttagcattacaggccggcctgagcagcaatcatgtgtcccatggggaagttctgcggaaagtggagaggggttcacggattgtcactgttgtgccccaggacacaaagcttgtattacaggtaagctggtttttcagacaagatagatagtctgattgtcattcagccaagtaccaagcataattcttgcaggttgtattttaggctttcttattctttgtatcgtttattgtaaacctttccttgatagttttctgttagctttattcaaaggagtgttgatacaggctgtgaccataaggctcaaagcgaaacttttcttgaaagtcaagataaatatagagaacaacaagattctgctaaaagtgtgctgattttagagagttgtggtaattctctgtgaagagttaggtaaaatggtgtatcctggctatttaaatgttttctacttaattaaaaatgttactgctttaatttatttaagatgccaaggggaaacttagaagttgttcatcatcgagccctggttttagctcagattcggaagtggttggacaagtaagtgccattgtactgtttgcgactagttagcttgtgatttatgtgtgaagacaataagtattttattacaatttcgagaacttaaaattatgaaaagccctcattacctatatcatcaatcagattcttagaggctcttttttttttttttaacttttttactttaatgcagtattttgtagtggagattcctagcagaaagaatcgtgacactcatcatataaaggagggcttctcttaacctgagggaacacatgtgggttttaggtggcctgtgaacccagggagattgtacacaccaaaccttgtctttgtgtatttattcaagtagaaagcccacagctttcaatagatttacagcggggcctatgacccagaaaagcctgagctactcttgtgaaggaaatgactgattttctgaacctatttggaggaaactttgtattggaaagatctatactaatgttttgtttaaaaagtagacctgaattccatgatgattttctttgttttttttttgagacagagtcttgctctgtcacccaggctggagtacagtggcgcaatctcggcttactgcaacctctgccttctgggttcaagcaatcctcccacttcagcctcccgcatagctaggattacaggtgtgcaccacgcctggctaatttttttttttgtattttcagtagagacagggtttcaccatgttggccaggctggtctcaaactcctgacctcaagtgttctgcccacctcggcctcccaaagtgctaggattacaggtgtgaaccaccgtgcccgggcttctgtaatgattttctgttgtatgtatgtgaagatgtagttctcagacagtcatgatgactaaattacaccttttaagaaggtaaatgaatgtggtacctgatttttttattctgtaatttcagagtagaaatccagtgatagcagcttggcattggggctgtaatctgattataactggtttgtatcataatgaaaatatgctgggcccatggagctcagtttttgtgaatatcttttctattctttctctgtcttctcacagacttatgtttaaagaggcatttgaatgcatgagaaagctgagaatcaatctcaatctgatttatgatcataaccctaaggtaactttctaagctgtcatttactctagcttactttgtacttaaactaatatgatctgaacgaagatgttttgtcctttttttggtaggtgtttcttggaaatgtggaaaccttcattaaacagatagattctgtgaatcatattaacttgttttttacagaattgaagtaagtattttgaataattcatgtgtatcttttccatagttttctctcttcttgttaaggaaatcaagcataaatagctagagaagaaaaattccttactgttcatttttaaaaattgctataactcttagatgccagttggttttttgctcttttccgttctttttaaaacagcctgtttaaaactatgtccttaaaacatgtcattcagaattattatttcacttgatttttaggtatacatataaaactacttgtttttcctaggagactgaaatcaaatggcatctttctctctgatgatctttcccctcaactttttaatgaaacactttcaaaatagagaaaagttgagagaattgtccagtaagcaacctatatataccccacctggattcgccagtttatatttttctgtatacacattctcattctctataatctgtccatccatcattcatcttgtttgtagacaaattgctaagtgagttgtagacatcagtccactctaccacctgtacttctccttgtatatcattaactagagggcattctttgtgtatgggttggttttgttgtgttttttcaggtcatatttatctacagtgaaatgtccaaatcttaagtgtgccacttagtgagttttggcaaatgtacacttcatgtaacctgaacctctgtcaagttagagggcatttactccttttcagaaagctgcttcagattcctttcaatcagtccctgtcccattccccaggcaactactcttctgaattttttaccataaatcagttttgcctgttcaagaacttcacctaaatggaagcatacagtattactcttctgcataaagctgttttcattcagcatattgtcttgagattcatctgtgtttttatatgtatcactagttcattctttttttattggtcagtagtatgccgttgtgtaaatacaccactatttgcttattcattcccctgttgctggacatgtggattgtactaccctgtttggggctaatgtgactaaaacatctacaaacatttgtataagtcttttgtggacatgttttatttctcaatatttttataattcaactcttttccaaaagtcatttttatttatcatcatcagcatgccaggtgtatgttagtaatttgatcgctgggctacatgttctgttgatgaccattccatacacacctgttcttagagaagaagatgtcacgaagaccatgtaccctgcaccagttaccagcagtgtctacctgtccagggatcctgacgggaataaaatagaccttgtctgcgatgctatgagagcagtcatggagagcataaatcctcataagtatgtatgctgtcaccaggtggcatcctttgaaaaaccgaagtgtgtagttgtccttgtccagcctacttacctttctcattctggtgttcttcacttattacctcagatactgcctatccatacttacatctcatgtaaagaagacaaccccagaactggaaattgtactgcaaaaagtacacgagcttcaaggtagagatccgctcacagagaaagtgcttaaggtggccgtgactgctactagtcttctgcaggtgacaatcaccatgtcattgccacaccacagatttaacatgtgactttttagttgccattttaagacccttgtcagtttttttcagtgctgccctctaaagcatatataaaagtatcagaagtatatattcttctgatgtccagttctattgagaaaaatttattgtctttttggttatgttgttaggtctgtggattttttccccaaatgattgtgttctgttttgttttctaaacactgttaggaaatgctccctctgatcctgatgctgtgagtgctgaagaggccttgaaatatttgctgcatctggtagatgttaatgaattatatgatcattctcttggcacctatgactttgatttggtcctcatggtagctgagaagtcacagaaggtatgtggagttcttacttttatgccatttggttcttgtttatataatgatagtgtgaaaccctgcttctggtagtgcagtagcttttctgctatcactctgtgagtgcagggctggagacagatctgtgagtttctagggcccacattcctaagcccctgtgcttatgaaagtgttttgattgtgaggttgaagaagtgaagtaaaattgcatggcttttttttgtttctttttttttgagacggagtctcactcagtcgcccaggctggagtgcagtggtgcgatctcggcttactgcaagttccacctcccgtgttcacgccattctcctgcctcagcctctctagtagctgggactacaggtgcccatcaccacgcccggctaattttttgtatttttagtagagacagggtttcactgtgttagccaggatggtctccatctcctgacctcgtgatccgcctacctcagtctcccaaagtgctggaattacaggtgtgggccaccatgtgcggcctaaaattacatggttatttttaagatgatgggcatatgtgtgagctaatttcttctcttataaaggaaatgtaacaagtggttcatgttccactccggttctttctcacatggctcttttttctagtggagggtgggcacatggagcacagaaggctcatggcctcctttcctatgttggtacatttgctatgatcaaaaactttgaacaccactggtatgcatattttttatttatttttttgcagcctcagtctcttccccatgacctctccaaaaatgaaaatcggatccttcatctctctgcttaaaatacttcatgagctcccattgttccgaggatataattcagaagccataatactgcttaaaaacccttccttgacctggcctctgtgtatctttccattctcacttcttggtattgtctttttttcctctgcccatggaggaaagacaatgcttttgtcccccttcccttgcccctcaccaccacatgccttggtgggcagcattacttctgccatccatgggctttgactgcttccaccctcaccattcccctggctaattctcactaatctaggttaaaggatgccaaggtggcctcttcccagtaagccattcatgcttccctccagggactgggtgaggtgaccctcctatatgcttctgttgcacacagtgcctacccctgcagactacagtgtgtctttatctagagtgcggtatttatttatttatttttgagacaaggtcgggctctatcacccgggctggagtgcagtggcaccatcttggctcactgcaacctacgcctcctaggctcaagcaatctcacctcagcttacaggcgtgcaccaccatgcccggctaagttttgaattttttttgttgagacggggtttcgccatgttgcccaggctggtctcaaacttgtgagctgaagcaatccatctgcctcggcctcccagagtgctgggaatgagcacttaattatttgttgtcttgggttttcttcctatgttgttcttacatgtatttatcctgtcagcccagggaaattgcattaaaaacaggaaacacctctccattaggaagaaaaacaatttgcttacagggcatggcatagagctggagatgatagtgccaataaatactaggttggcagggtctcagagttttgtgtccaactcagtataattttatgtttgttttaatgtgatcatttcaggagagcatggaatgtcatgaaaacagcaccaagagcaatgtcttagacttttaggagaaacttagatgcatttgttgaatatcttctagactgaaaccttatttcccttattagcctatgaaataaatgatactgtgagacttagttaaggaagttactattattccaagtgtaacttattaatatccgtatgtgaaagcatttttgccaaagcttgtttgatgttcagctgacccttgcacaacgtgagtttcaactgtgcgagtttgaactgtgtgggtttatctaaatgtggatctctctcaaacacagttggccctttgtgtccacggcttctgcatccacaatcagtgtggatcaaaagtacaatatttgcaggatttgaaacttgcagatacagagggccaacattttgtgtatccaggctccatggggtcaaatgtaggactggggtatgcttggattttggtatccttggggtgtcctggaaccaattccccatagatactgggggacaactgtagtttgattttatatattatataatatgcagttaatatataatacacatttaaaaattatgtagctttgggtttattgctatatgtaaatgctagtttctattcctatatatgaatatcacaagtaataaagttctcattaatcatttttttaggatcccaaagaatatcttccatttcttaatacacttaagaaaatggaaactaattatcagcggtttactatagacaaatacttgaaacgatatgaaaaagccattggccacctcagcaaatgtggtaagtgtggggattagtatgtttatctctacttcagatcttctttggaactaggcaaggtataaattaaactgttagtttagacagtgactgatttcacttcccactcctgaaaactctaacaattatgtatgctcacgttattttgtcctgtgttctgaaaagctgaaggtaatcacttttaatgaactggaggagctccctaggtaagaacgtcaagtagatccttttttggttaagaatgagcacctgtgaagttaacttcagtgtctcagaatcaaaattggttgtcagttcttccttctcatgctgtttgcagacatgtcagggaaactctgcttgtctggagagagtgatgaggccacctccccgtgccctgcaagacgcagttttaattgacagtgatggggtgccagttgttcttcccatgctggaacagttgtgattctttactgaggactgatgggggaaaggaagaatcacctggggtgcatgttaagccttcagctgctggcatccttggagaatctgattcaggtggtctgggataggactgaggcgtgcatgtgtctaataagcttcccaggtgatgtcttttcaaggaggctgagaaaacactgggctggaaagctgggactcttaagtaggatgctgatcccaatcagtgctgctcttgcctcagaatctgcagtggtgctcattaaaaattcaaattccaggatcccattcttcagattctctgattatttaggtcttaaaaagttcctcatttattttgtttggtgaccattggtataaatgaagtccattatgcttcccatgtcttaagcctgtctttgtgtgaatctttttcctgcaggacctgagtacttcccagaatgcttaaacttgataaaagataaaaacttgtataacgaagctctgaagttatattcaccaagctcacaacagtaccaggtatgtggtatgtgaaaatgaggctctcctggttttgctttttgctttagtaggaaaggagtgaggatcctaagttcataacaccatccttggcttcaaaatttatcttaaaactaattagcctcaatttgaacttcttatctgggagaatggtcctgacctgttctctgattcctcatctggaataccacagcaccttcctcgtggggttccctgcttctttcccacccctcctctagcccaaccttactgctgtaagtctgattatcctaacaagtacagatctttcccatatatttcagcataaagggaaatttttgtttgcttgaaaaagcatccctttagctttttttatataccacacactttgcttctaagttaaatgtgttatatgatcctcttaacagcctcatagggtgctgtacacaatttgtagatgaggaagcaacttgcctgaggatccagagctacaaagtgctggacctgggatacagagcccaggctgcctgaccaccctgcccatgccattaaccaccactctaccatgccaccagcatcaccattttcagtttgtcctcagacaatatacacatctttctttgatcaagcccctgccagcttctttagcaccagcttctgccactgtccacattcccagttacttgtaggtagttctacagatgtcacatcgtgtgattcctctgtcatttctctacccaccagccttcctttagccccatttgtccatcagaacccttgggttactcctgaatgccattcctggaccaggcgccaaacactgagcccccagagcagcctgccctcgccttggtgattgcatttgtcaaactgctgattagctggtttgtcgcctccaccaggctgtgggctccttaagggcagggactccatgttgtattcctctctgaatctctggctaacatccagcctggagaatcgaggatttggccagtggctacctctttgcccttgttttctgttctcttccacactctctctgctctagtcacactggccgtcctgttactcctcagacctgctatacacattcctgctgcatggccatggtgccttctctgccctctgcctggtgccccctatctcatcacgtggtttattctcctgacagccattagagctcacactccctgagagctgcaaggagactgtcctctgtccctttactcacgtttgccattatgctatagactatattttgtccctaagtccatcctctgttactataagagcagcaacttggtggtggttcttatatggtttttcatttgtttggttttattttttgccttgctgtagtatccatactgcccagaatggtgcatatgtagttaagagtaattatttgttgagtgaataaatggcacatcctcagtaaggttttgaatgaaaaaatgactgtactaactgatcaactgtaagattttcccaggtaattctttcaagggagttccaagtataggaactaaggcagctacactggagctttagagaaatgattgtcatatttcctcctcagtcctaaatctcctcttgtcacaggatatcagcattgcttatggggagcacctgatgcaggagcacatgtatgagccagcggggctcatgtttgcccgttgcggtgcccacgagaaagctctctcagcctttctgacatgtggcaactggaagcaagccctctgtgtggcagcccagcttaactttaccaaagaccagctggtgggcctcggcagaactctggcaggtaagtacaatcatttatatgtttacatctacaaaggttttaaaaaatttatttcttttgtttggtaattttgcaaataaatttagggcagaatactctgagacagtcttgttctcactgataaaaattaatttagaatgctttaaaggataagctactacagcaagagtcccagaatgcagtggcccaatatggaaagaagtttatttctctctcccatagggatttataggcccttccgttgtgtggctctgcaaccttttaggcagatggttgtagctgggttatctccacagctgtggggaaggaaggagagtggggagaagttagaatcatggtaaaacatttacctttaagttggaaatgacctggatggaagttaaactatcaccttctattccatctcggccacgccatgtagctggatgggctgtgccctgtaagaaggtaaagatgaatttttggatgggtccattctgttatagacagtaggttgttggaatagccaggaatgaggtggggaaaataaaaggccaaatgtcgaagcattctgaaagcaaaggcagtttagctgcgtcagggacaagggttgcccgaaccagaggcgaggctggtaccaggggctctagtaccagagtggaggaaagggtaaggacacctatgaaaagagatgagcagaagctctggtcatctcagcagtgcttgaagtaaagcaatgactggtatatttttttccctaacttgtaaatattgttgagatctcaaagaaaaaaataaaaagcagtcctaaaaaaattccaaactctatcctgttaaattttgttaaatttatgtaccagtccttctttgtcatttgcagtattctttttttcttgggattataccagtgtatgggattatcacttttctttttctggttattagcctttcccaaatccctccgtttccatgctggcctctttttacaaatgtcgagaattccttatttcaggccttttagttattcgttcggtctccattgttcctttctgctttagaaatttatgatattggttgtttataccttctatctctgttcttggatctcttctattctttacagctcttagcttgctatttcccatgtcttatgagggagtatttctagtttttctcagatgtttagcaaaagtaggtggggagggcagtggtcaaagatgtttgagaaatgttacacactggagtcactctgtgtgtacatttaacgtaggcagtttacacaagagagcaaaagaaaggtaactatttaaatagtggaggtgattttacctactttttttagtgatatatgcactggagtgagcatgcaatgagagaccggaatctaccagctccttcgaaagccttgggttctctgtgcctctcattgtggtttatctcaattgggctgagagtgattctaggatctaaagacactgcatgactcaaacataagtcagctacctccatctagtgctcaaccaaagaaatagtggtctcttactgttaagggacgaagtggtttagtgagagataccaggtcattttcccatatacatgctttggaagcatctttcaaggctaattttggctgtatatgattttcaattcctgtgctaaatttagattctagctgccatttaagataggactctgtggtgtatatacctattccctcacagaaattcagaaagtacatagtttcatacataataaagacatattaaagaagcacttgagctaaagtatctgtttaactttgtagtcaactgctgcttattgtctctacaggaaagctggttgagcagaggaagcacattgatgcggccatggttttggaagagtgtgcccaggtaaactcaattcctcccttctaaaccccccagtcagcaagaaaggtcttctcaattgtatcttagtgatcatgaaagttaaaggaactgtgcataattgttaagtccagagatagtgtttgccccagaggtcttatcttgctggcttgacttggaaatctaaatttagtacatctctaagtttggtgaggtagaatatgaaggtgctctactttaacataccactggtttgaccttggtagaaagtacttaattacatctcaaggtagctgtgctttttaaaattgagtttgccaaagtagaaacaatgagaaaggaccattataaaacaggatcattgaaggctacatactcttggcttttactctcattctccctattggaaatgtctcttttacctcagggacctggaggtacagcagattataaggataagtacccatatgagcatttggtagtattataggatttattatgaaaataataaaactgcagtaacactggccacagactaacagtacacaggtgcacagttgacaccagggattattgccttgtagagttttgacctttgatgagagagtgttttttacagttgttactgatagcacatttatgtaacttaattgtgctttaaaaatatttaattgtctcttgtgtaataacagtaagtgaaagacgataactaaaattttatataattagatcctggagagaatatttgttgggtgattgaattgaaaataccagtgaatgaaacatacctaaaagggtagataggttgggttggaaagatataccacatcgagggttaattaaatggataagatgtcattatctttttttctttgtaaaggaagattaatgcataaaattattttgtgtaatttacatacaataaaattatgtgttgtacagttgtataatttacatataataaagctaattcaccaattttagatgaagaattcagtacatttggacatatgtttgtagctgtgtaaccaccattgcactcatgatctagaacatttctaacacccccaaaagttccctacttccccttttgcagtcagccttctccctccactgccagcctttggcaaactgatcagtcagtaaagtttcacattatctagaatttcatataaacagaaccatatggtatgtagtctttttaatctggctcctttcactcacatagtgcattggagatgcatccatgttgtagtttattcctttgtattgctgaatagtatcccattatatgtatatgtcagaatttgttgatttaccagttgatgtacatttggattgttttcagtttggggttattatgaataacgcagccatgaacattctagtgcaggtctttatggggacaggagtaggaatgccacatcccgtggtaagtggatgtttaactttttaggaagctgcagaactaatctgcagtggccgtatcattttgcattcccctcagtgatatgtgagagtgcttcagtgactcctatactcaccaacactgggtgtattactgtgacactagatgtattatctattgctacgtaacaacttaccttaaaagctggcagcttaaaacaacagaccctattatcccactttttcaatgggccaagaatcttggctgggcttagctggggcctctggctcagggtcctttacaaggctgcaattaaggtattggccagggctagagtcatctcaaggcttgactagtttttaatttcattttctaatgttttattactagtatatagaaatatagctgaagtgttttgcagggaggctgtataattgaccttgtatcctgcaaccttgctaaactcatttattagttctagaagctcttgggtgtattctctaggattttctacatcaacaaacatggtttctataaatatagttttatgtctttcttacaatcaatacttttttctatctgtattgcattttctagggcttccagtgtggtgttgaatagaagtgttaagagtgaacatccttgcctttttcctgatattggagaaaattcacttgtcttttagcattaagtgtcatgtttgcttttttaaaattttattctatattattttatttttgagacagagtcttgctctgtcacccaggctggagtgcagtggtgtgatctcagctcactacaaccttgacctcctaggctcaagcgatcctcccacctcagcctcctgagtagctgggactgcaggaacatgccaccatgcctggctaatttttgtattttttgtagggatggggttttgccatgttgcccaggctggtcttgaactgttggattcaagcaattcgcctgtctcagcctcccaaagtgctgggattacaggcatgagcctccgtgcctggcctgatatttgcttttttttttttttttaatgctctctattgcagagttggcaaactacaacctgtgacaaatccagcatgccacctgtttttgtaaataaagctttattggagcatagccatgctcattagtttacatcttgtgtatggctgctttaacactacagcagcagagttagagttgtgacacagatagtttggcccataaggcctatatttactgtctaatcttttacaggaaaaatttgccaattcctgccctcttggtttgaggaaattcccttctgttccttgttctgagagtttgtatcatgaatgggtgttaaattttgtcaaatgcattttcaactatgaagggttttgtttttagacgagtgatatgggggactaggtgattgattttctactgttaaaccaaccttgcatctctgggttcaaccccacttggtattatagatttattaccctttttctcttgtggcagattagatctactaaaattttcttgaggatttttgtgtttgtgttcatgagggatattgtagttttttcgtgtctttgccatgttttgggtatcaggataatgctgctgtcattgaggggtgacaaaaatgaggggtggtgtcctttacacttctgttttctggaggatttcatgtagaattggtatgagagtctagcttatggttaaaaacctatgtgtgatgtttcagacctgaccataaacaattacagactttacctaggaggccacatggggaaaagctgccctccctacaccagacttggcgtactgccaatgcattacagtttctaaagggagttgcagtcaaggactcagggccccctgttagtcatgctcttgtaacagtatttgcattgagagtcctggcactttcattcttaggtctctctatctgaggccatgggccaaggtcttcttcaggcacctctgccaaggcctgtttatgcaagaaggagtggaaaaaccttgacatttttttccactgtgactcactacccagtacttttccacccttagcccccttcctttgcacccatacccccaagatccatcaaactgctaaagcctttttttccaagctccttcaacagtgaaccaaccctcatgtctgtgtggatccagctgactcttgactagtgagttgttccttgggaaaaaatggaacagagagagttggtgctttccctggttttagcctcttgcttataccaatgcaatgcctgaaggcttaattcatttttgacttgttgctttgatcagctactccaacacctgacagctcagctctttctcccagctcttgggagatatttttttctttaaatgtttagtagaatataccagtaaggccatctcggccaggagttttctttaatgaaagcttttccactattagttcagttactttagtagacattagcctattcaagtttatctgtgtcttctggaatgagcattggtagtttatgtctttcaagtaatttgttcatttcatctaaattgtcagatttattggtatgaagtgtttatagtattctcttattttactgtccgtagggtctatggtgatgtcctgtctttcattctagatattgatgtgtcttcttttttctgattattctggccagaggtttatcaattttattgatcttattaaagaatgaactgtttcattgtttttctctatgatttttctgtattctatatcattctttttttattattttattattttatttgctctttatttttctagtttcttaaggtgatggcttacttttatttttttcttatttttttcttttgttgttgttgtttttttaaagaaacagggtcccactcttgctcaggctggagtgcagtggcacgatcatggttcactgcagtctcaaactcctacattcaagctgtcctcccccctcagcctccagagtagttgggattacaggtgcatgccaccatgcctggctaatttttaattttttttgtagagatggggtgttactagttgcccacgctggtctgaaactcctggcctcaagtgatccctccacctctgcctcccaaagtgctgggattccatgtgtaagccactgtgcctgaccaaggtgatggcttaaagctattgatttgagatgattccttactttatagtttaagcatataatgccataattttcctcaagcaccgttttagttatgttatacaaattttgaaatgttttgttttcatttcctaatttcccttgtgatttctttattgaaccttggcttatttagaagtatgtttaacttgcagatattggagatttgccagccatctttttgttattaatttctactttaattttgttgtgattagagaacatacattttattaatttaaatttataatttattttaatttataatatggtctgttttacagaatgttgtgtgtgtatttgaaaataatatgaaagctactattattggatggagtgttctataaatgtcagttagattaggttgatcatgctgttctagctttttatatccttattgatttcctcactacttgctctatcaatgactgggaaagtgttgaagtctcccagtatttgtctatttctcctttgattctaccagtgtttgcttaatgtattttgaagctctgttataggtgcatacatgtttatgagtatgttatagatgtattcattttgatatccttctttctctgttactattcctaattctgaatttgactttaatgttattaatataattcttccagctttctcttggttagtcttttcattgcatatctttttctatccttttacttttaatctagctgaatgtagtctttattttgaaagtgcgttccttgttgatagcattattggttcttttttttttttaaatctaatttgacaatctctgtcttttaattggagggtttagacatttgcattgaatgtgattaccaatatagttagatttaaacctacagtcttgctgtttgctttttgtttgtttcattgatcctttgtttcttgtttttttctttttttgctttcctttggatttagtatttttcataattccattttacctccactgttggcttattagctatacttcttcatttcagtattttagtggttgctgtaggatttataataaatatcattaactgaccatatcttcagataatcgtatactacttcatatatagtgtaaaaaccttacaagagtattcactccataatactttgttattgcttttgctttaagtgatcaatgattgtttaaggaaattttttaatgacctttcatgtttattctttttttttttttccaaaagattcagtattttccgagttttcaaaaactgctggccactcaaagtggatcaacaaaaatttaagagctaaaactgtaaaactcttgaaggctgggcacagaggttcatgcctgtgattccagcactttgagaagctgaggtgggacaatcacttgagcccaggggtttgagaccagcctgggtaacatagaaagaccttgtttctacaaaaaataaaaacacaattagccaggcatggcggtgtgcacctgtagtcccaacttcttgggaggccaaggtggcaggatttcctgagcctgtaagtttgagactgcagtgagctgagttcacgccactgcacttcagcctggacaacagaacaagaccctgtctcaaaaccagaacgaaactataaaactcttagaagaaaacagggctaaatcttcatgactttggatttggcaatggatggttagaattaataccaaaaacacaatcaataaattgataaattggatttaataaaaattaagaacttttgtgtatcaaggacattgtcaagaatgtgaaaagacagcatatagaatggaagaagatatttgcaaatcctatatctgataaaggtttaatatccagaatatgtaaggaactcctgcagctcaacaacagaaagccagttaaatcaattttgaaatgagcaaacgcctgtaaacccagctgcttggcagattgagacaggaggattgcttgaggctaggagttcaagaccaacctggacaacatagtgagaccctgtctaaaaacatttttttaattagctgggtgtggtggcatattcctgtagtcccagctacatgggagaccgaggcaggaggatcacttggggccaggcagtcaaggctgccgtgagctgtgattatgccactgcatcccagcctgggcgacagagtgagaccctgtctgagaaaaaaaaaaaaaaaagaacaaaaaaaaatttagaagattgctattctagtctactattttttcaaagggtggtcttgttaacaattctggagcccacctaaacctgctaaatcaaacttggtagtaaagctggggagatgggcatgtctaacagacgtttctggtggttttgatgtccaggcgtgcagagagatgatgcttaccttgtgttttgtcattattttcaggatttacaccccttccttgtcttttgtatcaatatttatggagtcatgaactctaggataggcatgatgttgagaactaggagttctcccctggccagggagatagaggcaggtctgtggttagttttgtagttggctgtgatgacatctgacatgctctcttcacttgttgtcttcttcctgttcccttgtcaggattatgaagaagctgtgctcttgctgttagaaggagctgcctgggaagaagctttgaggctggtaagaatcttgtaaatcctctggatgttgggtgctaagcagagagagcaagcaagggattccaggtcagttggaatctcttgtcttctgaggttcatgaaataagtagaaataggtcaggttcctggcttaaggaaaagcggtgtttttaaaatcatttttatcattcttgataataatttgaaatattactgtcttttactgaaatgaattgaatttccttggctgccttgtaggaggcctgtttttcaggaaaatattctgattacctctgaaagtaatccatgtctttctaagtatcttaactctccagtgactagaagttttccttcctaaaattattgtgtttttccttctaggtatacaaatataacagactggatattatagaaaccaacgtaaagccttccattttagaaggtgagggttccattttagatagaattcctcatttggaagaaggtgaggagagagagatgagagagtctcctcctatttactgtgttttcttaataatatgtcatgtagactcaatcaaaattaccacctggatataatatttaattctcactagaatttttaaatatgctgaactattaaatggtaacaaaatatttaaatgttagaaacctgtgatcaaatatgattaagaatctttgtatttggaaatagtaaacttgaatatgaactatattagataataatataacactgataaatttctggcatttaataatcatgttgtggttatataagataatatcctattattctcaagagataaatgctgaaatatttaggaatgaaggatcatatctctgccttactcttaaaaggttccacaaaagtattaatgaatgtgtgtatgcatgcagagaaacaggaagcaaaaaaatgtcaaaatgttagtaattggtaaatcaaagtaaagggtatatgtgtgttcattgaactcttacaacttttatgtaggtttcaacgtttcaaagtattttttaaaagttaccttttcaaatgaagtttgtggttcttagagaacatatgaatattaccagttctagaatactcagatggtcactgtgacctcttaaaagcaaagtggagaaggacatcagtttgacttatagaaaccttagggagtggttgattttaagttctgcatttttatgcacatctaccctgtaagtaacgtctggcctttctgacatttacatgtatgcacattcttaccttgtctgcacccccttcctccatcctaattaaaacgttgctggggtactttttatgtcattcactttaggtacctctaactgggtactgaaaacatcattcctcatctataataatctaaccagctcttacttagattttcaccactaatgagaacctttcttagataaatgccgataattcatctacataggcccaaaacctattaataaaatgcatccttggatagtagtattttgcttttttaaaatgtattctactagtgttatttttctcttgtgtatttttccattggacaatatttattagatacattttttccacatccatgggcattttgatggatgtttagccagaaacatttaggtaattttcttcttatttttgttaactgagctcccctcccctaccccccctttttttgtttgtttgttttgtttgtttgtttgttttgccaatcctcccttgctttaggtatcaagtcttcgttcaggtgattttacaagttcagtggtagcgcatattctgggataatgttgatgaactctaagatctggaatctcagtctctaatttgttaatgcttattaaggaaaaagagctcgcttggaaaacctagtaacctctttctttttgctgaattttaaccctccttcactgctccccgcctttagttttttctctttgcttaaacctcatgctcaaactattttccattctgcatctccagcccagaaaaattatatggcatttctggactctcagacagccacattcagtcgccacaagaaacgtttattggtagttcgagagctcaaggagcaagcccagcaggcaggtctgggtgagtatctgcgtgaaggccatcgacgtgcgggggcagtggggttgggtaacgccacacattgtctagattgcttggtgatccgcctgcaatctgattactgtgccatgggcaagtgtgaggcttctgtggagccccttcagggccctctgtgtctgtgtttgtgtgttggtgaagggcaggaccaagcatgaatggggagagctctgccagacattcccacctacccccattcacccagagcagctgaccacttccgtgtctaacaaaatgagtttcctcatttccagaaaaaagttcaggaaactactgatttacattagtaattactgtatttaatattatctcattcattttgagatcaactttgcaatcattttcatccatcctttgatatgcaccagttgactctagttagttcatttaccgccctgaaagtaaacccacacattagcaggcagtgttttcatcggcttctggttcttcttttctagatgatgaggtaccccacgggcaagagtcagacctcttctctgaaactagcagtgtcgtgagtggcagtgagatgagtggcaaatactcccatagtaactccaggatatcagcgtacgtatcacattgattcagcacattgactatatcctgggcatatagggaaagtggaagcaaatagattggttttctactgggacggtgtagtgggagtggggagaatattcttcagcgctgtgtggaagttgttcagacactttcccagcatatctgagacattaaacttggcattggaaggttttcttcctcagccttgtggcttgtgtgttttcccattccccacgaggcagttcctcccctgaatgctcagtttatattaacatctgattttattttttgaacaaatgttgtgactaaattataggcactgaaaaaatgaaaagataagcttcttcaattcaaaatcaggattggaagagaccataaatgtaaaataagtcataacacttttaccaaatatagtaatttgtcagaaatatttattcagcactcatatggtaggtgcagtagatgttaccaaaaacttataaggagatatgagttataagagtttatagtcttgcttgggatgtgtaaagcaatgcaagattatatattcaaactgaattttgctttaggaatttaaaatggagatctgtgaagttgtgtggggtcatcagcaactgcaagaaagtagccaggcaaggtagcacatgcctgtagtcctagctactcaggaggcttaaaaatatctgtgtaatttctaacaggagatcatccaagaatcgccgaaaagcggagcggaagaagcacagcctcaaagaaggcagtccgctggaggacctggccctcctggaggcactgagtgaagtggtgcagaacactgaaaacctgaaaggtatattctcagtcctgatgatgattcctgaccacaaacaatagtgaataggcagtacagacaggcagagttcagtaggtgattaagctaccattttcccaatttgaggaaagatgagaacttttagcaggaagggtcatgtctgcacacattcctgaagcagcccttcttagctggtaactgagaagccttcctccatttggcatccccctaactgaactgggagagatgcttaggccaggataaagaattgtgggacactgctttctgcgtaggccccccagcgtgcttgattttctttttgtagtacatgtgtttaattattccagcatttgggaagaaaaaagataatgtgggagaaaggacctgcagtgggatcatagaaatttttggctttggatagaagctatgtatgattctgtcaatggagctgggaatataacttaccactctttcaaatttcttctctctagatgaagtataccatattttaaaggtactctttctctttgagtttgatgaacaaggaagggaattacagaaggcctttgaagatacgctgcagttgatggaaaggtcacttccagaaatttggactcttacttaccagcagaattcagctaccccggtaagttttctcagagacggtgtgcatttttttcatcattttcatgggttattgtattcacacaatctccaagtcaaaaagttttcctgttcttaaaacataagatgccatagttaaattatcttagatttatgtgtaagctgtcagtaagatttgatatttgcctgtagagtgactagtataccttggcataggttaaatggactgtcattttcctttctggatgaagtagctgtcatggagaaaatgggaaagtcacatgattgctcctggccttcaatgaggttggagtggggagagatgggggaagatggggtcagagacggcctctcactttcctttcagaactcagggatgggatcaggctttaaagggaccccaggcaattgcttttccttttgttttatgaaaaatttgacttgtcacttctatgttgttatgatggactttgcgggttgtgtttaaggctgaatcagctttgtatcgcagaattctagtatattgtcatctgtttattatttatacctctgttcactctcttatacttcaagtctattgttaagagtttttatttggattcaaaaaggctggtgtatcagtcaagatctagaaaggaaaacaaaagcctatctattattttatcacagaatttaatatatggatttgttaaataagtattagaggactaaacaaggcaaaagggaaatacagaggaaggacattgagatagtaactgtaggaagcagctttaccctctagctgagggaacaggaggagttgttgggaattattagaatttagaagcctggaagtggggccctgtagagctggctcttgaacctctgagaggagggtgccagccagctaatcctggcatttctgagggagctggttccaagcgtacagaagtaaatggaaactggaaggaacagctgctgctgggggaaaagccagccggtcgggccaggtgtggtggtggctcacgcctgtaatcccagcactttgggaggccaaggcaggcggatcacctgaagtcaggagttcgtgactaatgtggccaacatggagaagccccgtctctactaaaaatacaaaattacccgggcatggtggcgcatgcctgtaatcccagctactcaggaggctgaggcaagagaatcgcttgaacctgggagacagaggttgtgatgagccaagatcgtgccattgtactccaacctgggcagcaagagcgaatctccgtttaaaaaaaaaaaaaaaaaagccagccaatcacggaagaaatctagaaatcttttgttcatcctccagctttgtactccccctctggtgttcactgtaggcaggacatgatgggaagccagcagcaaggaagaatatctttcaggtgcccagccccagcaccacaagcagtggatagaagggtgggttggagctgagagattacaaatcagctcagtgtttagaaacacatacgcttatcatgtcttgatttcctcatttagaaatgggcataagacttctctgtgtgcttcaatagaatgctttgaaggttaaataagagggtgtgtgtaaaagcactttacaaaccgttgaaataaaagcaactaggaatcagggccccagaacttcttgaatttattataataggtatttcttagaagaaatgtgatcatcatcttcaaaactgtagtacttttgaagataattgtttttgttttttgagacagggtctcactctgttgctcaggctggagtgcagtgatcaccgctcactgcagcatccaccgccccgggctcaggtgatcctcccacctcagcctcttgagtagctgggactacaggcgcatgccacaacacctggttaattttcaaattttctgtagagacagggtgtcaccaagttgtccccgctggtcttgaacaactcctgggctcaagtggtctgcccacctcacctctccaaagtgctgggactataggcatcagccaccatgcccggcttgaagataataatttataataccactcccatgagtgatcttctcttctgatcacatattcacattaaggtctattttattttatttttttcttgctctgtcacccaggctagagtgcagtgacagtatgatcaatcatggcttggtgcagcctcgaatgcctgggctaaagcagtcctcccaccgcagtctcctgagtaattgggaccacaggtgcacaccaccatgcccagctaattttaaaattttttcctagacatggggagagggagtcttgctgtgttgcccaagctggtcttgaactcctggcctcaagtgatcctcctgccttggcctcccaaagtgctgagattacaggtgtaagccaccatgcctcccacattaagttctaagacatcaattttatgattgtggttttgattggtgaagtatggttgtggtatgtgcaggataccgtgagtgacttctcatggcattgctcttgagagtgtgccaccaagggtctgcactaaccaggggtgtgcccagaggctcgctgcaggcttgaaattcctgcggagtcttgtgttttacctggagcacatgtgcacagtttccattctgctccatagtatgcacatgtttgtatttatttcaacctaaaaatgtttgtttcccataactctttgcgtataattgatactctacgtatttgtagcctcttttactcttttccctttcctcagggagtggtttgctcatttagaaaaggccaagatatatcactgtagagtttcgtttcttttcttttcctccaccccccatctttaccttgttctgggagaaaggagaattagaagtctgagttgcagctggagaaactggcaaattaaaatcacattgggaaagagaattactgtgtttcacaccataccagtagaaatgacaggctgttttctgggggtagggatttggcctttggtattggcagtcttgagaagtattagataatctttgctgatacagtctattttctcctcaggttctaggtcccaattctactgcaaatagtatcatggcatcttatcagcaacagaagacttcggttcctgttcttggttagtattttttctcatttaatattacaatactaagcagaaggactatctttctgtaagtattgagaagatcagcagtataaggagagattggatacaatttttcactacaaaaaattgactacaattcttcctcaattctaagaccgcatctttagtatgatcagtttcatgcttctagcggtgggggacctggtgcaggaaaatccagcatgaccattgtatgtgtaatttttaaaaatatttatgtggcatatgcttgttcataaaggcacaccacagttccagtttcagtctaaactgtctacatttacatatacatcaaaagattcttctgaagcatcattactggctattggcagttatgctttgcatcttgggggcattttcataaaccttgcttatgagtgggacctttttattatgtttaggattgacaatataatttgaaggcaaatccaaagaatattagcattttatacatatttcctgtttagttatgcatgaagtgttttatttgttgaggggagatgattctcaattagattacttatatccctaaaaattaaaaaccctaagcgctttcttttgaaagttggttagaaacatttgatgagtcagcttgggactttcagtatttgcccttacttatagttggatcaatgaagcatcttagctttgaaaagtgaatgatagtttctaaaataattggcagttttaactgctattatttgcatttctagcatgtgacaagcaactttctgaaattttttttcaccgaagtgctacactgtaatagcattttgatgacatttgaagtagcctgtggggattcaaattaagtttgactttaacagcttatgttgctaccaggaagaacagctaccttccatcccagctaaactcatacatccagactgtaactactgtattcctagctcctcttctgtctagagaatggcaaggttcttttggtatcagtttcgacatatccacttattcctttttttttcttaagttttttcatttagaaaaaaaaacagatggggtcttaatatgttgcccaggctggtctcagcctcctggtctcaagtgatcctcctgcctcggcctcccaaagtgctgggattacaggcgtctgcccctgtgcccagcccacttatttcccagatgctaggaacttacattagacctgaggccatttggtcattgtttattttgtgctgtagtccaatccagttgtgatttctgcctcctgtgttcctcgttgctggcctgatgctgaccttcaggttaggtcagtcccatcattccccagggtattctagatggctttcccacttcaaagagcactttcttgttttccagctgagccttaaagacactctgtaatatttgagagcccctcattatctgagtgtttattatcattacccttgtggtttcaaggatgtataggaaaaggtaagttcctataattcaaaaattgccactgatgaactaatcacaaaattagtgccactcaaatattactcagctgcccctccccagctaacaatagttaagtatattggcacatccccacaagtgaaatcaatgacttgatgggtcatttctgattgtttcctgctttgatgcaatacaatatcatgcagatcaattgcaagtcttgcaaaaatttagtattacataaaatagattaaaatgatattggaaaagtacttgaatcacagctgggttggacttgttgcaattgatgacaaaataagtgcttcaaatgattttgactatcaaaggattgagagaggtccttagaaaaattgaaaagccctcaagttatttttataaaaatggccttttttgtgtgctgtgaaatccacatatggaaatgtgaaatatgtcatgtcctgctgtcatataatttgtcagaataattactttcttgcccaaaagtctgtactttgtgtttatttcaagttaagtctagaatcaaatatagttgtagttatgcctaattttaaaaaatgagatagagcacattatttttgtaactagtttttttttttttttttttttttttttttttttttcagacagagtcttgctctgtggcccaggcgggagtgcagtggcgcaatctcggctcactgcaagctccgcctcccgggttcacgccattctcctgcctcaccctcctgagtagctgggactacaggcgcccgccatcacgcccggctaatttttttgtatttttagtagagacggggtttcaccgtgttagccaggatggtctcgatctcctgacctcgtgatccacccgcctcggcctcccaaagtgctgggattacaagcgtgagccaccgcgcccggcctgtaactagtttttttaagataaagtcttattccaactttaattggaatttatgaaataccttgttgatagtgaatttatttaagtagccttttttcagtattgatattcttatatctttatggcaccatttagtggagagaaatgtaaacaaacataaagatgtagtattaaatcataactgcataaaattaactgtagtatgtactgcactactgtaataattttgtagctacctcctgttgctattgtggtgagtgagctcaagtgttaccaatatctgcttaaaatgccatgtgccgctaaccatctccacatgagcagcacatgagagtctccattaattgcatatggcagcgaaaagtgatctcttgcattgtcgtgtattttttatcacgtttaatgtaatatcgtaaaccttaaataacaccatgagacctataggaagtaccacaagtgttgctcccaggaagcagagaaaagtcataacattacaagaaaaagttgacttgctcgatatgtactatagattgaggtctgcagctgtagttgcccaccacttcaagataaatgaacccagtgcaaggactattataaaagaaaaggaaatttatgaagctgtcactgcagttatgccagcaggcatgaaaaccttgtactttttgcaaaatacctttttatgttgtattgaagatgcagcttttatgtgggtgcaggattgctatgagaaaggcatacctatacaactattatgatttgagaaaaagcacagtcattgtatgagaacttaaagcaaaaagatgaaggatcaaagctggagaatttaatgccagcaaaggatggtttgataattttagaaagaggtttggctttgtaaatgtctggataataggaaaagcagctcctgccatccaggaggcagcagcaaaggcagtcaggtttatgatcaggactgcccttatctgtaaagctgctaacccccgagcctggaagggaaaagattaacaccagctgccaggcttttggttgtaccatacaacaagaaggcttggacaaggagaacactttttctggattggttccattgtcgatttgtccctgaagttaagtagtatcttgccagtaaggggactgccttttaaagttcttttgatactggagaatgcccgaggccaccccaaactccatgagttcaacaccgaagacattgaagtgatctacttgcccccaaacacacatctctaattcagcctctagatcagggtgtcataaggacctttaaggctcgttacaaacagtactctatagaaaggattgtcaaatgtatggaaaagaaccttgacagaacatgaaagtctgaaagaattacaccatcaatgatgccatcattgttatagaaaaagctgtgaaagccatcaagcccaggacaataaattcctgctagagaaaactgtgtccagatgtgcatgacttcacaggctttacgacagccaatcaaggaaatcatgaaaaagattgtggatctggcacaaaaaaaaaaaaaaaaaaaaaaaatggtgcatgaaggatttcaagataggaatcttggagaaattcaagaggtgatagacatcacaccggaggaattaacagaagatgacttgatggagatgagtacttccaaaccagcgccagacaatgaggaagattacataaaagaagcagtgccagaaaataaattgacatttgttccaaaggttccaattattcaagactgcctttggcttcttttacaacatggatgattctatgttatgggcactgaaactaaaagaaactgtggaaggattggtaccttagagaaatgaaaaagcaaaaacatcagaaattatggtgtatttctgtaaagttagtgacactgagtgtgcccacctctcttgcctcctctttaacctcccctacctgtttcatctctaccacccctgagacagcaagaccaacccctccacttcctcctctacttcagcctactcaacgtggagatgacaaagatgaagacctttatgatgatccacttccatttaatgaatagtaaatattgttttctttatgattttcttaatattttcttttctctagcttactttattgtaggaatgtagtatataatacatataacatacaaaacatttgttaactgactttttatgctgccaatacactgccgaacaacagtaagctattggtacttgagttttggagattcagaagttaaacatggggccaggtgtggtggctcacacctgtaatcccagcactttgggaggctgaggtgggtggaacgagaccaggagttttgagagtagcctgggcagcatggtgaaaccttgtctctacagaaattagccaggtatggtggtgtacacttgtagtcccagctacttgggaggctgaggcaggagaatcgcttgaacccagggggtcgaggctgcagtgagtcatgatcgtgccactgcactccaacctgggcaacaaaatgagaccctgtctcaaaaaaagaaaaaaaaaaggtatatgcagatttttgactgtgcaggggggtccgcacccataaccctacattcaaggatcaactgtaatttttcatgcctgcatggctcatatgtacagatttactgctggaagtttatcataaataatgctgaaaaagaaaatccttatatatacatattttctcctatctctgcttgcagtatatgattcctggttagaaaagaaacttaacaaatctaagtgaaagagtgcctgggagttttaggttacaatgacagaatcttttcctaaccctctctctccattcactttttttaaagcaggggcatctttattgatcaacatgtttgtcgaagtttcatcataaagtagttcctgtccattaacttcacttactgaatatgtgctatcacattttgctattccttaaaaattgagctagactttacatatagtgaaatgcagagatttcaggtgtacaatttgatgagttttaataaatgtatacagccatgtgactgctgccaccacccctcccaccagtttgaaatacagaacattcttccactttgaatcactgggtgagcatgcctgaggttgaaatgcagtccctcctctcagggcggggcctccaggttgtgtttgctctgacctggaggttgcaggggtagcagacacatgaactctggctctgatggtcttattgctgcaaactccacctgcctagtttgtttagtttagagttactgcctcagcgccctccaacaagagtatgtctgtcacaatttcccttcctttcttgcttttagatgctgagctttttataccaccaaagatcaacagaagaacccagtggaagctgagcctgctagactgagtgactgcagttaggagggatccgacagagaagaccatttccactcattcctgttgtcctaccaccccttgctctttgagggctggctattgagaactggaaagagtaaaatgataacttaccttagcattgccaagaacttcagcagacaacaagcaattctatttattttatgttgtgtatacatcttgatcattagcaagacattaagctttaaccattatggcaccattttgtgagaatgattgttctttcacttgggctgtttgagagcataattatggtaatcatgagattaatgtttcatgatttctacctccaaagtgtgaagacaagtaaaacaatgtttctaaattgtcttattttgttggcggagaagattacaatggctattagtgctacatttggtcaaatgtaatcacttaaatagcttcttgtcaccttaaactaaagcagaataaaaagtatcctttgaaattataagccctcctttgctgacagctattattttgtaacatcttaccaggtcatgtgctttcagttataactgggctgagcctcctataattacaatgtctatagggactgttttactgcctgtgtattttctgctagagagttagcaatgttagagctagaacagattagaatttctaaacagtatcatgcacagttggtgtgagtgatcagtgtgcattgtatggcatgcatggttgtgaattattctctgttctccaaatactgtttctttaactcagatatttttgttagtgtctaggccacttcatttatttttcgtcatggtactttactgacttctctttattcaattctccacgccctcaccaaaaaaaactgtctcaaaatgagaatattttattttcatggtgagtctagaaaacgcccacttcattctgattaaaaattcttccatgttttaaatatcagaaccagacctttcttactgtgtatcttagcccatttgtgtctctataacaacaaccagctttcaaaggaactaatagagtgaaaactcactcattaccacgaggatggcacaagcgattcacgtaggatctgcccctgtgaccaaaacacctcccattgggccccacttccaacactggtgatcacatttcaacatgaggtttagggaaacaaatgcctaaactacagcactgtacataaactaacaggaaatgctgcttttgatcctcaaagaagtgatatagccaaaattgtaatttaagaagcctttcccagtatagcaagatgttaactatagaatcaatctaggagtattcactgtaaaattcaacttttctgtatgtttgaacattttcacaatctcataggagtttttaaaaagaagagaaagaagatatactttgctttggagaaatctactttttgacttacatgggtttgctgtaattaagtgcccaatattgaaaggctgcaagtactttgtaatcactctttggcatgggtaaataagcatggtaacttatattgaaatatagtgctcttgctttggataactgtaaagggacccatgctgatagactggaaatagaagtaaatgtgtttattgataatggtgtgaattttcctggacattcagtttccttaaataatgtattgaagcagcaagaaataatttgtttgaatgcaaattactatcaattactgtttctctcatctgagcaggattggattttgttcctttttagaagaagcaggcaggaggagaccttccaaattgaggcaaagccaagaattgaatattcatgggggaaaattgagtgtatgagaaaaggaggaaactcctctgagtgatgaatgcttaatttgggggaaagagtctgtcaagttttagaaaagagtacataaatttggatcctgtcccaaagcaagttcatgctgcaataagctaaaaccttcacttttcttggttccattgagtcagatagctttgctcagatgctctaaacttcaagaaggaacttgcagaagactgtcttcttcggtcaaagtgcattttaaatttatgcttttgaaaaaactgaggccgggtgcggtggatcacacctgt

SEQ ID NO: 93 - DNA, 6133 bp, Homo sapiens
aattacagtgctttggggttcgacatcaaaacagagatcaaatacaaaagtttgggcagatgggcaagagggcagagggacaggggacgcggccaatgtagctcctctacctctacggtgccaggcctacaaagaaggccggccgccgtaagtgaccagaagcgggcccggcctcgccccctccgcctggtgacgtcactcccgcgccgcactcccagtgctgcggctgcctagttgacgcacccattgagtcgctggcttctttgcagcgcttcagcgttttcccctggagggcgcctccatccttggaggcctagtgccgtcggagagagagcgggagccgcggacagagacgcgtgcgcaattcggagccgactctgggtgcggactgtgggagctgactctgggtagccggctgcgcgtggctggggaggcgaggccggacgcacctctgtttgggggtcctcagagattaatgattcatcaagggatagttgtacttgtctcgtgggaatcacttcatcatgcgaaatctgaaattatttcggaccctggagttcagggatattcaaggtccagggaatcctcagtgcttctctctccgaactgaacaggggacggtgctcattggttcagaacatggcctgatagaagtagaccctgtctcaagagaagtgaaaaatgaagtttctttggtggcagaaggctttctcccagaggatggaagtggccgcattgttggtgttcaggacttgctggatcaggagtctgtgtgtgtggccacagcctctggagacgtcatactctgcagtctcagcacacaacagctggagtgtgttgggagtgtagccagtggtatctctgttatgagttggagtcctgaccaagagctggtgcttcttgccacaggtcaacagaccctgattatgatgacaaaagattttgagccaatcctggagcagcagatccatcaggatgattttggtgaaagcaagtttatcactgttggatggggtaggaaggagacacagttccatggatcagaaggcagacaagcagcttttcagatgcaaatgcatgagtctgctttgccctgggatgaccatagaccacaagttacctggcggggggatggacagttttttgctgtgagtgttgtttgcccagaaacaggggctcggaaggtcagagtgtggaaccgagagtttgctttgcagtcaaccagtgagcctgtggcaggactgggaccagccctggcttggaaaccctcaggcagtttgattgcatctacacaagataaacccaaccagcaggatattgtgttttttgagaaaaatggactccttcatggacactttacacttcccttccttaaagatgaggttaaggtaaatgacttgctctggaatgcagattcctctgtgcttgcagtctggctggaagaccttcagagagaagaaagctccattccgaaaacctgtgttcagctctggactgttggaaactatcactggtatctcaagcaaagtttatccttcagcacctgtgggaagagcaagattgtgtctctgatgtgggaccctgtgaccccataccggctgcatgttctctgtcagggctggcattacctcgcctatgattggcactggacgactgaccggagcgtgggagataattcaagtgacttgtccaatgtggctgtcattgatggaaacagggtgttggtgacagtcttccggcagactgtggttccgcctcccatgtgcacctaccaactgctgttcccacaccctgtgaatcaagtcacattcttagcacaccctcaaaagagtaatgaccttgctgttctagatgccagtaaccagatttctgtttataaatgtggtgattgtccaagtgctgaccctacagtgaaactgggagctgtgggtggaagtggatttaaagtttgccttagaactcctcatttggaaaagagatacaaaatccagtttgagaataatgaagatcaagatgtaaacccgctgaaactaggccttctcacttggattgaagaagacgtcttcctggctgtaagccacagtgagttcagcccccggtctgtcattcaccatttgactgcagcttcttctgagatggatgaagagcatggacagctcaatgtcagttcatctgcagcggtggatggggtcataatcagtctatgttgcaattccaagaccaagtcagtagtattacagctggctgatggccagatatttaagtacctttgggagtcaccttctctggctattaaaccatggaagaactctggtggatttcctgttcggtttccttatccatgcacccagaccgaattggccatgattggagaagaggaatgtgtccttggtctgactgacaggtgtcgctttttcatcaatgacattgaggttgcgtcaaatatcacgtcatttgcagtatatgatgagtttttattgttgacaacccattcccatacctgccagtgtttttgcctgagggatgcttcatttaaaacattacaggccggcctgagcagcaatcatgtgtcccatggggaagttctgcggaaagtggagaggggttcacggattgtcactgttgtgccccaggacacaaagcttgtattacagatgccaaggggaaacttagaagttgttcatcatcgagccctggttttagctcagattcggaagtggttggacaaacttatgtttaaagaggcatttgaatgcatgagaaagctgagaatcaatctcaatctgatttatgatcataaccctaaggtgtttcttggaaatgtggaaaccttcattaaacagatagattctgtgaatcatattaacttgttttttacagaattgaaagaagaagatgtcacgaagaccatgtaccctgcaccagttaccagcagtgtctacctgtccagggatcctgacgggaataaaatagaccttgtctgcgatgctatgagagcagtcatggagagcataaatcctcataaatactgcctatccatacttacatctcatgtaaagaagacaaccccagaactggaaattgtactgcaaaaagtacacgagcttcaaggaaatgctccctctgatcctgatgctgtgagtgctgaagaggccttgaaatatttgctgcatctggtagatgttaatgaattatatgatcattctcttggcacctatgactttgatttggtcctcatggtagctgagaagtcacagaaggatcccaaagaatatcttccatttcttaatacacttaagaaaatggaaactaattatcagcggtttactatagacaaatacttgaaacgatatgaaaaagccattggccacctcagcaaatgtggacctgagtacttcccagaatgcttaaacttgataaaagataaaaacttgtataacgaagctctgaagttatattcaccaagctcacaacagtaccaggatatcagcattgcttatggggagcacctgatgcaggagcacatgtatgagccagcggggctcatgtttgcccgttgcggtgcccacgagaaagctctctcagcctttctgacatgtggcaactggaagcaagccctctgtgtggcagcccagcttaactttaccaaagaccagctggtgggcctcggcagaactctggcaggaaagctggttgagcagaggaagcacattgatgcggccatggttttggaagagtgtgcccaggattatgaagaagctgtgctcttgctgttagaaggagctgcctgggaagaagctttgaggctggtatacaaatataacagactggatattatagaaaccaacgtaaagccttccattttagaagcccagaaaaattatatggcatttctggactctcagacagccacattcagtcgccacaagaaacgtttattggtagttcgagagctcaaggagcaagcccagcaggcaggtctggatgatgaggtaccccacgggcaagagtcagacctcttctctgaaactagcagtgtcgtgagtggcagtgagatgagtggcaaatactcccatagtaactccaggatatcagcgagatcatccaagaatcgccgaaaagcggagcggaagaagcacagcctcaaagaaggcagtccgctggaggacctggccctcctggaggcactgagtgaagtggtgcagaacactgaaaacctgaaagatgaagtataccatattttaaaggtactctttctctttgagtttgatgaacaaggaagggaattacagaaggcctttgaagatacgctgcagttgatggaaaggtcacttccagaaatttggactcttacttaccagcagaattcagctaccccggttctaggtcccaattctactgcaaatagtatcatggcatcttatcagcaacagaagacttcggttcctgttcttgatgctgagctttttataccaccaaagatcaacagaagaacccagtggaagctgagcctgctagactgagtgactgcagttaggagggatccgacagagaagaccatttccactcattcctgttgtcctaccaccccttgctctttgagggctggctattgagaactggaaagagtaaaatgataacttaccttagcattgccaagaacttcagcagacaacaagcaattctatttattttatgttgtgtatacatcttgatcattagcaagacattaagctttaaccattatggcaccattttgtgagaatgattgttctttcacttgggctgtttgagagcataattatggtaatcatgagattaatgtttcatgatttctacctccaaagtgtgaagacaagtaaaacaatgtttctaaattgtcttattttgttggcggagaagattacaatggctattagtgctacatttggtcaaatgtaatcacttaaatagcttcttgtcaccttaaactaaagcagaataaaaagtatcctttgaaattataagccctcctttgctgacagctattattttgtaacatcttaccaggtcatgtgctttcagttataactgggctgagcctcctataattacaatgtctatagggactgttttactgcctgtgtattttctgctagagagttagcaatgttagagctagaacagattagaatttctaaacagtatcatgcacagttggtgtgagtgatcagtgtgcattgtatggcatgcatggttgtgaattattctctgttctccaaatactgtttctttaactcagatatttttgttagtgtctaggccacttcatttatttttcgtcatggtactttactgacttctctttattcaattctccacgccctcaccaaaaaaaactgtctcaaaatgagaatattttattttcatggtgagtctagaaaacgcccacttcattctgattaaaaattcttccatgttttaaatatcagaaccagacctttcttactgtgtatcttagcccatttgtgtctctataacaacaaccagctttcaaaggaactaatagagtgaaaactcactcattaccacgaggatggcacaagcgattcacgtaggatctgcccctgtgaccaaaacacctcccattgggccccacttccaacactggtgatcacatttcaacatgaggtttagggaaacaaatgcctaaactacagcactgtacataaactaacaggaaatgctgcttttgatcctcaaagaagtgatatagccaaaattgtaatttaagaagcctttcccagtatagcaagatgttaactatagaatcaatctaggagtattcactgtaaaattcaacttttctgtatgtttgaacattttcacaatctcataggagtttttaaaaagaagagaaagaagatatactttgctttggagaaatctactttttgacttacatgggtttgctgtaattaagtgcccaatattgaaaggctgcaagtactttgtaatcactctttggcatgggtaaataagcatggtaacttatattgaaatatagtgctcttgctttggataactgtaaagggacccatgctgatagactggaaatagaagtaaatgtgtttattgaaaaaaaaaaaaaaaa

SEQ ID NO: 94 - DNA, 52511 bp, Homo sapiens
aggtcagccatagatcaaaatgtcactgccaggctctgccaggcttcgatggatatgtgagtgtgttgggtttgggttttgttttgtcttgttttgttgggggtggaggtgttagggaaggtgggaggggaaatcagttgaggggggcactctcacacacactgattcagacccctgcggcccacagtaaaacccagccctgtccccaaggaattcacagaacaaggattgatttctccctggtggaaaagtgcaggaggaagccaggactgaaggtacgctggaggtgagggcgtagcaagggctgacagtccaggagggccatgaacctcgacaagagtatccagagaaggccgggcgcggtggcccgcgcctgtaatcccagcactttgggaggccgaggtgggcagatcacgaggtcaggagatcgagaccttcctggcgaacacggtgaaaccccgtctctactaaaaatacaaaaaaaaaaaattagccgggcgtggtggcgggcgcctgtagtcccagctactcgggaggctgaggcaggagaatggcgtgaacccgggaggcggagcttgcagtgagccaagatcatgccactgcactgtagcctgggcgacagagcgagactccgtctcgggggggaaaaaaaaagaatatccagagaaaacggactagattgccccgccccccgcccgtgtaaatagtttccgtatctctctattccggtccccacaaaaaagtcccaaacctcctccctacgtctccacgatcttcttcctcaaacgcatgtgttcaggtaccacttccagagaaataccagcttgaagcccagctactgccacctcaggcccataggcacactggggcccatttgctcccaggcttcagtgggaggcgacgactcagcaccttcgactccagcctcgcagcggccccgccccacagaggcctggccccgcccctccgcgctcaggccccgcccccagctccgagggcggctggcccggtcgcggtcgcggctctttccagctcctggcagccgggcacccgaaggaacgggtcgtgcaacgacgcagctggacctggcccagccatggaccgaaaagtggcccgagaattccggcataaggtcagagctgcagggcgccccaggcttctgggactccggagtcctgggcgcggtgggtagggggtggacaccccggcactgcccctcccttttccggccccacctgatggctctggttgggctgggacacccgagggtcgtctggctggcagcagggatccccagtaaagtgagggagggaatgcggggactcccggctcaaggactgctaaacgagtcgatcttctgccagcctttctccctctgccttccaggggcagggacgtctctggggtttgaattccttccagtcttggccgcttttctgaggtgccccctttgtgggcaagcccctctccttcctagtgcccccagctcagggctgttgaggcatgtggagacagtctggggcagtatctgagaggtgagggttgggagaagggaaactagacgtctctctctctgccttttgacctcagaacatgagttagaagcatttcagccctgcctgcctaagggcgtttcttagggtctgagaagtagctgaggagctggtgctgacccgggtgcggtggggaggaagggaggaggtactgagggcgtcggagctgggctctggccggccagatccttcaggcagagccgggtccaccctggtgtgtcccagtgaggggcctcactggtggtctgggattctcaaggaccatctctggaagtggccaggtttcacacagggcatttcgagaatgattcacaaagctgtgcagaatctgctgaggccctgagaccagagagggccatcaaagagatccagcctacttccccaccaagtcttaggatgcctctgagtctggggatgaagccgcttggggggggtgggtggtatctggagctccccacaggccctgcctgaggggcaggtaactattgataacttaactattgataactgtgtgacccaaggctctcccaaagaccccaggggcagtgtctttagaccaagccaaacctcttcctggtttgagagctgagctcaggtagggcaggtcagggtgcttaactccttccttcccataaagaggcccataggagcccaaggagctagccagtgtaggggccacaggggcttggggccaagggcccggggtcagttattcatttaataagcatgttttgagcatcctctcagccatacccagtctgtgccctttgctggtggtgtaggtgggaggcagaccctaccctggtaattacccatgtctgagtgctgcgtgttgaggccaagcttttgtaggggcacaaagggacagctcaaactggcagaaggctcctgaaaacaaggtcttgggcatttctggtcctgctcccaggggtgggtgatagctggaagttcagcaggaatttaggggctggcgaataccaaggggagcttgagagagcattcactgttacatcctgttgcaaagagacatgtcggaagaaatttcagccactaaggacattttgtgagtgtagatttcaggcaacccagtttgaaggagctcagccttccatcccccaacccaagactcagggttgaatttcagtttcctgcccctggcctgaaataacatcaggtcttctgccttcactctgtggggtacctgctctctcttttttgtgagaatcatctccagggtccctggtgtctgatgcagatcctgggtttgccctgttcctcttccccaggtcccacaggctccaaagggcctcagacctccacgtttcctctgccctactcttcctcatcgcaacagtcattacttattaatatccctgtgtgcaggcagggcaggcgccatgcgctaggcaaggcccaggctggactttgtgccctgctgccttggagacagccacagccttcccctcccaggttggggatcatccaggaactggggagagaggatgaagcacagaggatagaaaggaggcacacagacatgctgggagaaatttacagcttgctgttgtttgctttgtaggggtcccttccttagtgttttggaagaaatggtttgtgatctaaatccttagttgttggaagtaatatttaaggtagtgtgttataatggaaagtgctctgtgaccttgagcaagttacttaatctctctgtgcctcagtgctcttacttgtgaaaagagataacaatatttaacgaataaggttaccatgaatgctgaatgagacctacatgtgtgtggggagcttaaatagaccctggcacttagggagctctcaagaaatgtccatgttgattattatctggagttagcagaactgggaccaaatcttagccctgtcactgtcaggaagaccttgaccaagccacccactctccctgagttttagtttcttcagctatgagatggagtttgtagaacttacctcacaagacagtcaaaactaactagcaattaaagtactggctgctctgggcccacagtaaccacactgtttccagctgatacctgcagagtgtccagtgggagccaacaggctccaggcatcgactccctttgatttgtgaagttaccccaaggccgccaggagcacttgcatacccttccagtaactagtagcaaccttgggccaggatgtgggggagcagggcttggtcagagactgttttctccctcagagaaccagctttcaaagggagactgctcttctgttcgcagcaccagcacagggtaggaacttggttactcattggcttaaaagtatttattgcctcttcagcaatcatgcatttatgagcatagctgtgtattctgcctgaggccaggcatctgacaaccggttgggatgaataagatcagaaagagccaccactctctaggaatttgttaatcattcatttattcacataggcaataaatattgactgagcccttaatatatgccaggcagtactctaagcatcaaaaaacaaaataaagcccttgctgtcttagacagtacattccagtagggaagacaggtagttaaaaggaaatcaacaaaagtatcatacaatgccagatagtgataaattctatgaaaaaataaactaagatggggagagagagatagtaagtgacaaggtaggcagtcacgaaggcctctctgaagaggtgacatctgagcagagacctagaagaagtgaggagaaggagccacagagatacatgtagaagagcattccctaaagtggaagcaacaagtgtgaaggccctgaggcaagcagatgcccgcctgtatggaacagcaagtaggacagtgtgtcccagaggaatcgtgagtggagaatggtgagaaatgggtcggaggggtggtaggggcctggtaggccatggtcaggtcaggattttcttgtaagtgtgaatgatttacatttaaaaggaattgttctggctgctctgtagagaatccactgaggggcccaagagtagaaggggacctcagtcaggaggctcctgcaggagcccaggccagaggcaggggctcggactcgggtgagaatgggtcggattcaggatacatgttaaaggaaaaactgacaggctttgctgatggattggctgcgagcgtagaaagagaggcatcaagggtgaatccacatttggtggagacggagcaggttggtggagacggagcaggaggtggtggaaacctagcgttccacttcgaatgctgtaagtttgagacgcctgctagaggtgactgagaaggctgtaggtctggcctggagataagcatcggtaggtccttgggggtgtgagtggtatttaaacccctgagatgaatgaggtcacttagagagacagtgcagatggagaggagacctaggacagagcccggggtacctcaacttttggaggagaaggagcagcaagcgaggaaggaaagcaaggagaagcagggcgtgattgctgtgccaggcacagggtgaaatactacaaactagctgacatgtcaagagcctctgaaaagatgaagggcactgtctatgtccttgatggtggtgatgctttcacacgtgcacatttatccccaaactcatcaggttgtatacactaaatatatacagcgctttacatgtcaggcatacctcaataaagtggttccagaaaaagaaaagaagtcaggtgtggcggctcacgcctgaaatcccagcattttgggaggctgaggtgggagaatcacttgagtccatgagtttgagaccagcctgggcaacatagcgagaccccatctctacaaaaaatacaaaaattagccaggtgtggtgttgtgcacctgtagtcccagctacttgagaggttgaggcaggagaatcaattgagcctggaggttgaggctgcagtgagctgtggtcacaccactgcactccagcttgggtgacagagtaagacctggtctcaaaaaaaaaaaaaaaaagaaaaagaaagaaacagaaacagaaagaaaagaaagagagagagacagagacagagacagagagaaccctagacaagaaagaaagaaagcaaaagaaaaagaaaagatggatgataagaaaatgagagtcaaataaagcctggtaccactgggatgcacactctaaaggcctgggaagaagtgtggctggatctattcatcccactaacatctacagagggccactcgctgcccactgctgtggatatagaatttatgtccacttattgtcacttagttttatgtaacaaacacaggacttactacctgccaggcactgttctgaactcttcataattattaactcattaaattaatactaaaaaacaatgattaatctctcatagtgattaaatcccattttaaaaagagatgttagtcctcattttacagataaggaaactgaggcacagagaggagcagacccagttggggaaggggttctttggctctaccaccacactcacaagccaggcctgtgtctgggccacacacaggcttgtggggagacaggagggtaaagggagaaagttcagcacagcttggtgagtcccatggcagagttggggacaaagtgctgttgtgtgcacagagaaagatgtggccagctttgtgtgggagcctaaggaaagacttggccaagaagaggcgacatttgaagtgagtcttaaagatagaggaggagtccacagagaggaaatactgctggtaccaccattgctaatggctaaccagggtggcagcagggagcaggtggctcgtccaagggggaagccaagaaagctttatgaacaggttctacagaaaagggcaggattaaatgacccaacaagctgcaccctggggccagatgcaggaggccagcatccctgaaggggccagtagagggaaggttaccagaacaggtgagaaccagggctgccaaagaggcccagacagcagctgcagccttgggtggaggaacctgcctaactgtggcccagcagccagcccccagggactaggagcctcagttcctgtctccccacgcctctcatctcctgcttgtgcctcccgatggctgaacacagcagaaagccagaggggagaggagcccaggcagagccctctggacaaagggcagggtggagaaggctggaggcatgaaaggaaaagatctagcacacattttggagaccttgaaatgtcccaggcattgtcatacgtgctttacacatactcactcatttaatccccgcaacagcccaaagagacttcatcaagcagaacaacatgcattatttaatttgttctggctctctttctccctgtttggctgggtgcacacctaaagttgaatcttcctgagttgactgtcccatggttcccctgtgtagctatcctgaagggccagtccatatgggggaatacagagggatgagactggagggtaccacatggccaaacccagcttttgcctccaataccctagacaaggggcctgaagattgtgagggtggagatgctccctgtcccctcctccctcccacacagaccaatagcacagtgccagagaaacatcagtcagcaaatgctaatctaggcagggctggcagcaggggcagggggtagcagggatgataatagagatccccaacagctatttgtagatggtgggctcctttagggcttctgtgcttaatatcaagagggatccaagaaaaggaaaggctttctaaatctagtcggagaaagaagactggtgtctttcccacagtaggtgttcaatagatgtgtaatggacaagtggacaacaaaggagttatatttcataagtggataccatgtggtagattgaaaaaaagcagaggttttggagccagtaggcataggttggggtctcaattctgtcacttctctgagcctctgtttcctcatctgtaaagtggggatgataacgttcacctcagagggttgttaggatattaaagataatacacgtaaagttcctcaggcagtggacagtcagtagggagaggctggctgggataagtgagccagacagaaagagactcaggctgggaggcaggtgaggaggctccagactctagaagaggggacttgggcctcatctgaaatgaaggcaggattcagatgagaggaggaaagctgtccattgtggatagatggagtcgctgggacctacttttttgtgatgaattggaagtgaactaaggggaggcagacccagaatatatgtgctgaggaccagtggaaaggtggtgacccaggcctgggccaacaggtcagaaagaaggctctagactagagcaaatagagttcacgtttcatcaacggacgccactgggcaccgtgcgcttgtgtgcatgacatggttctgggttccacagggaaatgaagaacatgtttggaaggaagggaagaaaggagtgtgggagatttactgcgtgcctagtgcttcgtatgtacctgagtacagggtactgggacaatggtacaaagcaccctagagcaggggctccccaaaactgatcctcgggctagtgctaggcagaattccagaagagaggaaactatataattttttaatattggaaaagtaatttgatttggaccacagggaagactacaaagaaaaagtaatttaagtgatggtggtattgttactgcacgttcaggctttagagaaacttccatctttctcagctttctttcctggtgccttttaatgcctgaagagtgaggtgtgagtgtgtgttttcactcaggtgtggtcagagaacaaagcagtgctgttctttctgagtctttctgagatatttctgggtgagaatgatccctccctttgcaggatctcctgtgtaaccagttttcaagtttttgatgatctatcacttagattcatatttaaagagcattctacacaaaccagatctattttccctgttagctggtatggtctatagagaattgtttaaatagacaagtcagacatggcggtagatggaatgttctgagtgaggacaaggagattccagtgtgtcaggggaaggatctgttccactgcagctgagtcccacttgggatgtggtgaagcgagcaatggcagaactgaggacagggtttgagtgacctaaccggtgacagtgggtggacatgaggccgaagagctgagctctgcagctgtctcaggagacaggtaggatgagacctctgggagcagtggtcagtgctggagggctgctgacaagggccaggagcccgggaccttcagggacaggctcctttccaccaagaccatctccaagtgatctgtgcttggcccagggaagggagaaaaacagaaccctagaccctaacattgcaagttaccttactcttctacctcagttttccacctaatgcacaataaacatggtctaaggaggacagttcctcactactgaaatctaatgctacagcaagatacatttctgcaaagagggataagagggaacttcagtcctaaggcctcagtcaataagagattctctgtcccatcttctttcttgtgtcaccacccagggttataactaggctagaagtctttagtcagggtgtcctctcttcagccaaagcagacgtgatttttatgctccccttagaaagtacaacacttgggttcaaagagtcattcaaaagatgtcccattttctcactcattatagaccaagccaaaagtgttttcttaacagtgcagaggagagagatggggcttagagataagaaaggagttcttgaaagcaaagggttggaaattttggcctaaagggacattgggagttattttcccctgccaggcctgagtcacaatcaatggtcatcgtggcgtagcagaaagaacatgggctttggagtcagacttaggttcatatcctagctctgcttattagctgtgggacactgggtgagttgacttaacctctctgatcctcagtttcctcagctgcagcattatgtgagaatattgccccaatgtgataaacaaatggaataaagcccatgaaaagctcctggtgccaccgcatggggcattatggggacaacatcatttcccttccccttctgttcccatggttacctccctcccacctgaaccatgtgggcataccaggaggcaggcagataaattcattcaatacttctttattgagagcttattatgtgttgggcacgagaaatttagaacaaaatagatctcatctttcccctcatgggatttttctgtccagcgaaggtgacagagaaaacaattcacagagaaaacaaaccttaaattacaaattgtagtcgatctgtgaaggaattgaaacatctccggggtgcaggagtcggttctgtctgggtaggtgagcagggaagacctctctggaaaggaggtggccaggcagggaagtgggggaagcagtccaagcagagggaacaagcatacgccaaggccctgaggctggagagcgttcggcctgtgggaagaactgaaaggaggactttgtagccaggaagactggtaggagaggagattgggctttgataagtcaaagtaaggagtttggatttaggtttggtttggggtacaagaaactactgagcaagcaagcaacatatctaatttataaagatatttctcgcccctgctgctaggagagttcatactcctccatcacagcccagtgtgggcagcccaggcctgtctcagggaggcacccctgccccacaggcctgagcagagggggtgagagaatccaggctatgtggagagatgagctttcagaggtggtgggtgcgaaaggccagcctcccaccctaagatttagtaccacccactcaagcagatgcttccatctcctgtcatctgggagctcctttttttttttttttttttgagatggagtctcgctctgtcacccagcctggagtgcagtggtgcaatcttggctcactgcaacctccgcctcccgagttcaagtgattctcctgcctcagcctcctaagtagctgggattacaggggcataccactacgcccagctaatttttgtattttaatagagacagggttttgccatgttagcgaggctggtctcaaactcctgatctcaggtgatctgcccacctcggcctcccaaagtgctgggattataggcgtgagccaccgcacccagccctagctgggaactccttgcactgaggtagggagaaagcaagggtgcccttttggagcaggtgggctgaacttctgtagcaactaaagcccaagctgtgagtcaagcctcccaagttattctcacctttaatgaaatgctcagtctgattttatagggaaggaggtactgtcagatctaggccagaaatctgcattctgtaccccctgctcaggccagaaatcccaagggctgggcccagcatgtcccctctgtggtgggacggacagactgccccggtcttccagaacccttgggatacccacagaaagaggtaacgctgctctggccctcttctgaggacgagtcagtggagagcatgcagcttccagctgcagcctctctatgaagggctgaggccctgggccgggaggctggaggagagagggacccagtgaccccccaagcttccaccttgctctgttacccgttcttgggctgaagagagacccaaaaatacagtgtagagattcacactgaggtaactcagggagtggaattcagggcctcccgctgggattgaggtgctaatgacacaactcctgaacctgaccttagagtgccagccattgacgtcaacaaagttgaaatgatgtaacctgacgctccccctgcggggcttgtgcaggggcctggggagggggaaggagtggccatgaaactgactagtggacagaacccagctaaggtcaggacaagacagagtgaaggtcccctggcactgatgttacagaagaattcggtggtaaggggcttctggagagtggcatgtgctatctaagcgagtggcccaaatccttcctgaaagcatttatccggcactacagccaccatcaggtaagacagtgggcttcttctggccatggatgacacagccatgggggtgagcagcagcactgccatggcagcgtgtcactgtcacatggggattcacatatgtacctatgtgtgttcatccccgtgtgtgcacatattgccccacctggggacaaagggtgcctggccacatctggaggggcagcggtactcctgtggccacgttggggtggtctgcataggtctgatgcattggggtcagaggggcagcctggcctgtggctcctcttctctcctcacaactccagccctgaaaagctgctggggaggcccttggggatgacctctcctccctgaggtctgctatgggggcgggtgctgagcctggagctgtgattctgctattggattttccaggtggattttctgattgaaaatgatgcagagaaggactatctctatgatgtgctgcgaatgtaccaccagtaagtgtgctgggtccagctcttgtgggccacttgggttcctttgtcttcagggagccctgggatgggttgttctgagacagaggagctcagagggtggatgctcacggctcctggaaatcaaatggacataccattcactcatttcagcaactatttacacaagtactttgtacttggctttgtactaggggctgggtatagttgtgagccagacagattggtctctgttttcaggttgctcacagtctgatggaggaggctgtctagtagccagatagattctatagagcatgattgttgggacagaacaagaaatgccagctggccacagcccttgcatcagatgtctccgatcacccacttgctttttgattcattttttctactttataagctcctgccactgctgggcactgtgcagaatctggaaatgaattagatccaatttctttccttgagtaacttgtggtctggtgaggggagatgaacatacactgcaaacacaaagaactctaatataagttacatcaaataactgctaagtagaggtaaaagcagaaatgtgaagaaaggagttttcctttccaactgcgagggaagaggaaggaccaggaaggcttgagcaaggctttgaaggataagaaagatttggggccaggcaaggtggctcatgcctgtaatcccagaactttgagaagctgaggcaggaggattgcttgagcctaagagttagagaccagcctgggcaacatggtgaaatcccatctctacaaaaaaatacaaaaaattagccgggtatggtggcgcgtgcctgtagtcccagctacttaggagactgaggtgggaatatcacctgaacccaggaggtcaaggctgcagtgagccatgattgcatcaatgcactccagcctgggcaagacagcaagaccctgtctcaaaaaaataataataaaagaaaaagattttggtaggtggaatatctgggaagggcattccagaatgagggatcagcatcagccaaagtgtggaggcatgaaagcaagggtgtgaatggagataagtaatctgggggagtaggacttgggagggcacggagatcataaatagccacaaggctggagaagctccatggggacaggtcatggagggccttgagcctgctgagaagagtggactttgtcctctgggcagtaaggggccatcaaagggttttaagccagggagtgccttacactgagaaaagatgacgtgacagtgagtacatgggcaggcagctgcagtcgaaggtctgaacagcatgagggaggaggcatgtgaactgtggtgaggtgaaattgacagagcttagcagcagatacgagtggagatgatgagtgtgtgaggaattgtcagcatctcacacagagctttcccctctggaaagatcccaacagccgagataggcagcgctgagtttgaaatcctggcttcatctcatctgcaaaatgagtcaacaatccctagtagactggtttcctggggatatttatataagagaacaaagtcttctcaggcactggcccggtgtgaagagctctgggcttttcaggagtggtctactccattcctaagcctgggcccagtggctgaaatggcttcctcttggaatccctgggtgcctgaggtcatggccaggggtgaggctccaggcattcccggcatctccacaggaccatggacgtggccgtgctcgtgggagacctgaagctggtcatcaatgaacccagccgtctgcctctgtttgatgccattcggccgctgatcccactgaagcaccaggtggaatatgatcagctgaccccccggcgctccaggtgcagaggaagccaccaggctggaggcagggggtggagagatcaccctgggcggggcagtgctggcagccaagctgcaccatcaccgacctctcctgtgtggcaggaagctgaaggaggtgcgtctggaccgtctgcaccccgaaggcctcggcctgagtgtgcgtggtggcctggagtttggctgtgggctcttcatctcccacctcatcaaaggcggtcaggcagacagcgtcgggctccaggtgagcaaacagagtccgggggagggggagcgagggcctcggacctcctgcctccccctcattcatccactaggctgtgtggcacaacatggtcacccacttttctgagccttcgggtgaagaagaggctggcgcatcctgatgggtgttcttaggctcatagaaatcaggccgcaggcaattgcctgttttcttgagtgaagctggtaacctggctgctgcctgcttccaactgctgcctccttccagctgctgccgctgcacttccccccacctcccctactccccaagagaggaagacagtgatgctggcatatgaagttttggacctgttgccttttaccagcagggggaaagaaagcctggtgcagtgtgatgccgaagagcatagactctgaagcagggttagccgggttcaattctggctttgctgttcattaggctgtgtgacttggtggaatgacttaaccctgtgcttcaatttcctcatctataaaatgagttgccgatagtactgtctacctcgtcaggttttgttagtaaatgaattaatagtagaaagtgcttatagcagggcctggcatacaaatgctgtgagcctggtaagtgaacagagagagggagatttaagaaacgcctggaatgtgccaggtcacatgctcacaagcagtccttgctatatgcattgaacggatcgtgcccattttacagaattaatagaggctcagaggccagtaagtggcagagccaggattagaaactaactgggtctcctgactgccaagcccagaaatctctcttcagcaacgcaggtgcctctcctttggggtccccacacctcagggcctgagcagagatgggcagacctccaggtctcactcctacctgagcccagggctgtgtttttgtgtgttgagataaaggaggccctcccaccatcaccaagagcttccagcgggtttgttatcaacatcccaatccaggctgccaagcttggggctttcaaggggctcgaaggctaatggtacaagacactgtggcgtaaggggtggaaacagggagctgacagacaccgctttgttctaaatccctgtctcacggctccctggtggtgtctgaaatttcagccccttcattatttctttcctctgcagcacattttccagctcagaaatgcagccagagaaaacacataatgagcgcctctcttggcgtcagctgaggccgccttttttccagggcgagctctcttaggacaagcagttctcaatgctgcctcgatgactgggggcgttggggtattttaatgagacctacagttttaccttcctggctgtttctcaggcttatgaattatcggccctttctctagctgacgggttcatctctcctttgtgccgctgtccctcagatcgttatatcatcgtggcccttgcacaaagggccctttgcagggctccacacagggcgagacggggaggaaagttgatcctgcaacctgagccaggggctgtgtgggaatcattccgactggggttctgggcaaattccctttaggaataagacagggaactttactcagaggagcttcgggaaaaatggctgcatccattgacctgtctggggttcatgcttctggggagatctcatgcctgagggcaactggaagaagatgctggaaggcaggggatgagcaggttcagatacagcccggctgggctaaagacctgtgctgatttgacctgtgaggctgggtccccagtggtgggcttggaccctcccacaggacctagtcctgggggtccacccctctgcccttgtcccctgctggagatacttggtttttgtttttttttccccaagaatatcctaacttaacctacatcctctgccttgcacagggcagcctgtgacatacaacttgctgtatattccagacctagaaaattattctgtgtgctttggttttccctgtcataacatggacagctgcctttgtgtgggacttgagggctctgacaggtggcaaggatccagagagggcaggatgcagggaattgcagctaggcttggccggatgcccttcttttctacttccagacacccaagagacaccacttgtcgatcagggagacctgacttcaaatcccacgacactgtttactattggggtaaccttgagcaagtcactttacctctctgagcctcagttttctcatccgattaacagagatacaaattcctgctctgcagggttgttgtgaaaaataggtggaaggagttagtctggccgctgtccttgaattacatgttcccagaaacctagagagttctttagtgggcccccaccccagtgccattttgagcccttggccactcctgtcaggtccctgagaagactggggtctgtgtcccggagtgggagggaagcgttccttggaatagtgagaaggtgactctgtgggaatgctgtagagggcaggagttgccctagaggacccctcggaggctgcatgtccacccagcccctacctacctagacccacagggagtccagcttgcatccctcacgtgtgccagcacgtctccaaagggtgagcacgtgtgtttcgagttaagcccccagctgacctgcactggcctcagaccggaacctctccaggagccagtctctgttttgcagctactggctgtgtgaccttggacaaaacctcacttccttgggcttcagcttcagctgttatctgagagttcctcctgccctgtggttattaaatgaggagctccagaattgatccccagggccggggtgcctggaggagccggcagtatccagcagggggcaatctcaccacggctctgtatccagggctggctgcccagggcccatctcaacaatccactgtggcctaagccctgagaagagagatctgagctgagtattcagggatcaggactaactcatgataacaatagcaatcatgtattgagtgcttactgtgtggcaggcactagctgtctttacatgcacaagttcacttaattctcacagcaaccttggtattccccattttacagacgaggaaaacaggttcagacagttcaagagacttgctcaaggtcatatagctaataataataaaagaagggatttgaacccagcacatctgatgccaaagccctgtgctcgttcactgttctttgcttgctcccaaaataggaattcagaggtcagggccacagcagagttaaaatgttcatcaagtttccatatgatgggaaaaaaaaatcatatgtgtgtgtgtgttggtgatgtgagcttgggtcaggagtcacagaaggtccccaccccgactcagttacagtgttgtagcaattaacagagatagggagccaacttcctaggggtgggttgggacaaagtcccggtaagaatagcttaaagctgagtgaaatgtcaccctttgcatagaatccagaatctgatggtgccccagtggagtgaaaggggcactagagtgagggtgcagagagttctgagatcttctcccagctctgctgcacacccgctgtgcccctcacccctgtcttggtttctccatctgtaaaatggggcgacaagactgcttggacatgccacctgaacctgggatcccccgggctgatggagggtgggttggttgagatcaaggcttattccagggggtggcacagccacccttcccttttccggagagcagtccgggagcatctggtggtgagtctgccccactgcctgatgctccctccacctggtgctccctgcctctctctgtggtcaaggtaggggacgagatcgtccggatcaatggatattccatctcctcctgtacccatgaggaggtcatcaacctcattcgaaccaagaaaactgtgtccatcaaagtgagacgtgagtgaggccagagcagggcagtactccataacggtgggagggagggagggcgggggagcagggcagtactccatgacggtgggagggagggagggcgggggagcaggtcagtactccatgacggtgggagggagggagggcgggggagctgtcctaacccctgtgcctttctcccgcagacatcggcctgatccccgtgaaaaggtgagaggcccctcctctgcaggccaactcttccctgtgggcccaggatcctggtacagccctggggtccggctcccaccatgccagccctgcttctgggccagtggaggctggaggctctagacatggtggatctggatgtggggcctggttcctcaaacgtctctcgctaaccaccctcccatctattttcccttcccatcagctctcctgatgagcccctcacttggcagtatgtggatcagtttgtgtcggaatctggggtaagggccagacctcctgtgatggggtttgggtggggtcatcttcaaggaggggtggccggtcctgaagggagggcttgctctagagatgcaccctcaggggcttcacacaggctcccagggcagccagcacaccgctgtggggcagcagccctcggccaggcccagctggtgcagacacatccccagggacggaatgatgatctggctggcgtgagttcagcagtgctcgccctgcagatcccacaagctcaagaggccgcttgcacgcatgtggacactccgtgattctgcttctatctctctttcagggcgtgcgaggcagcctgggctcccctggaaatcgggaaaacaaggagaagaaggtcttcatcagcctggtaggctcccgaggccttggctgcaggtgggtggcaggcatgccctggggtcattcgtggccagtgcaccccagcaggcccctattgccctccccttcctcactgccacttccgaggaaaccttgcccaccaggggtgtgactgtccatgggtgatgatactttttttgttagatacagggtctgactctgttgcccaggctggagtgcagtggcatgatcatagctcactgtagcctcaacctccccagctcaagcaatcctcccacctcagcctcctgagtagctggatctacaggaacacactgccatacccagctaacttttaatttttttgtagagatggagttttgttatgttgcccaggctggtctcaaactcctgggctcaagtgatcctcccacctcagcctcccaaagccctgggattagaggcatgaagcaccgcacccagccttggtgttgacacttcttggtgcctgatttcccctctgaacttcatgacaggcctttagggccagagggtcatctctaacagagcccaatttacagatgaggaaattgaggcccagaggcagaacagtgttaccttgtgggcccttgagtcactgcaaaaggagcctgtttggctggtcatctctgtcacagctctcttgtcacttattaacttgttggcttccttaagaggcagacagggaattccgaacagacactgggccacacggggcttaagcatgcaggtgccaccgttactcagatcccagttccagccctgctttcccacttaagagctctggaaccttgggccagttacttaaccactttgagcctcagtttctccctctataaatgggcgataataattcccacatcacagggtggttgtggagaaagtaaagtgccaaacttagtacctgctaaatagtaagcagttggtaaatattagctattattatttaagttatccctgttctttcctttcattcacatttattcaatgttttgtgccaagcacaagtgataaaaagtcccacctttctgggagacaacagcctaatctagaagccaaccaagtaaatagttataatatagggtgatagggactcgaacgggactacattctgcgtccaggatggcaaataggtgccatctctagtcaatgagtagcagctccctggagtgctgctttgaaaagcattctaaagctgtatccaggattgtgggaaagagtgctgtgatcaatgagtgacttctgccaccaatctaggaaggaatactaacagtacatgtaccatccttgccgtaaatgtcataggagcactgagaacagagcggctagtttagtcttgggatagaataagggatctgagccaggcatggtggtgcacacctgtagtcgcagctaggctgaggtgggaagattgcttgatcccaggagttggaggttgcagagagctatgatcacaccactgcactccaacctgggtgacagagcaagaccctgtctctaaaaaataaatttaaaaaaataagaggatctggtaaaaaccttatagaagggatagcatttgagtcttaatggatggacaggaaagtgctagaaagaaagaagaaacagcatatgaggtatattaggtgagaggttgggtaggaagaattacaaggatttttctgtggctgttgcccagggtagcagtagaaatcaggctggagagggacacagaggctgaagaggtaggcagtcaagggccttcagtcctcagctcatgagtgacctgtatcctgagcactggacatgggttacctgaatcccgagcacacatttcccacctcccgcagcatttccagcggccccatccagaagcctggcatctttatcagccatgtgaaacctggctccctgtctgctgaggtgggattggaggtgagtgacgctgggccggccccagtgggggcccactggaaattgggtcagactgtgatcccgcggtgacaggggcaggtgcctttccacatggccctctttcagtggacactgagggagtaggagccctacccaccctgcagagaaggcttcacagactggggatgtttgacccttctgcagccttccccagctctgatagttgttggtcacgagcttgggaatgtcgtaatggtaatcaaagagcggaccttcagtgtccacttgcatcagacattgttccatgccctttacacttcacaagaatgctgagggttaagtaccaccattatccccactttacatatgaggaaactgagacccagagaaagtatatgatttttccaaaatcgtgtacctcatatggtagggctgggattcaaacctaggtggtccaatcccaaagcaggaacccttaacctcttctttggacaagttacttcatgtctgtttgcttacctgtaagatggggataatacaggctttcttccaaggttgttgtgtgggttaaagtaattaatatgtatactagagctgtgccaagcacattgtaagtgatcagtgaatgttagctattctgttatgacgattcaacacagcctgtgctaaatgagaagctcaaaggttcccgcatctgcaaactgtgatttttaaagcaaatgtcatcaaatttagccaaagaaatgaacatgtaatggtataatatttgatagttgataagatagttatgaagtaggggagtgccagggtcagctttaagccctcccagagctccaccagagctttccaactgctccattcatcaggaggagctgaggtactgccacttgaagatccagcatctgacccagagcccctgggggagcctgtcctgcagatgagcgagtgtacagatagcgcaaacacactaatctttctccatttccccaccagataggggaccagattgtcgaagtcaatggcgtcgacttctctaacctggatcacaaggaggtgagatgtgggggtcttcacctgttggcccttgtcatctccacaccccacttctcatccccaccaccctggagcctggggccttctgtgctctctgcctggactgctgtggtctgtcaggcctcggcccactgtccttctgtccccacaggctgtaaatgtgctgaagagtagccgcagcctgaccatctccattgtagctgcagctgtaagtccagaatgagctggtgggagccccttgaccttcatccccagcccctctgacctttgatctctgccacacactcccagggtggctggtctccttccctgaagctctgacagagcagagcgagaggacttctgcccagcaagaagtttgggtcagggattgcgggagccgcagtgcctgatggtgctgagaagaccacctgcatctcggcccccaggggtgtgtcaggggatccccaggttccccgggggctgagcaaggggcctcttttctcccatgagggccgggagctgttcatgacagaccgggagcggctggcagaggcgcggcagcgtgagctgcagcggcaggagcttctcatgcagaagcggctggcgatggagtccaacaagatcctccaggagcagcaggagatggagcggcagtgagtgcagccagccctggatgccctgtcccgcctcccaccccaccacacgaccccacctagcttgcttcctgcccgctgtgtccccagccaacttcctcctcctccctggaggccagtcctcagaccagatgagtttggtggtaggtcagcgtatccatccttggcctcagaccacctggctccttcctccttgctgagcagagccccctgtcttccaacattccaagaatatggaaaataagcatcctactagcagtaggctctagctagctaggattagctaccagctaacatttgtcaagtacctccataaggctggtgttgtattagggccttgtttatgtttcttaattcccacaatagccctgggaggtagagagtattaaccccattttagaggtgtggagactgacactcagagaggtgaagccacttgtgtctaacgtcacacgtggccaagctgggatcacccccaggcaatctggcaagtccccacagggctgccctgcctatagtgatgaagctcacccttgtccaggaggattgaaatgatggcctaagagaataaatggggtgagcaattcataaatcaaaaactactgtcaagatccaaatccaaataccttttaggcatttaaaagtatttcatggctggacgcagtgactcacgcctgttatcccagcactttggaggtcgaggccggcagatcatctgaggtcaggagttcgagaccagcctggccagcatggtgaaactgtgtctctactaaaaatacaaaaaaaaattagctgggcatagtggcatgcgactgtaatcccagcttctcgggaggctgagacatgagaatcacttgaacctgggaggcagaggttgcagtgagctgatatcgcaccactgaactcctgggtgcaaagtgagactttgtctcaatcaatcaatcaattaatgtattttgaaaaggaaagaggaaaggctgtccccatctcccccaacacagagttagctgggagtattccacctggctaggagcccctgctttgctcctggggtcagtccaggccccgcctgtcatcagtcaccttacctaagtgtttggaggagggtgcatggagtgtggccttcacatggatctgcttccctcctcccacagcccagcatctctgctcagccatgccagacaaaaccacgcaagagcacagcgtccagactttgttagataacgtcccccaaaaccaaagctggtccaggcctcctaggaagggagcctggagaaaaatccaacttttctccaaatcaagaattcacagtaaggaagagttcatttctcttgcatagggccaaacatgccaatctgcatttgtgtttcagaaggagaaaagaaattgcccagaaggcagcagaggaaaatgagagataccggaaggagatggaacagtgagtacctcggctccacgcgtgtctgtgcatgaacatcagtgtgctcaggggagtgtggccaaccagaggctgcctccagaaccagtttacctggttctctcatcccctggtgggtcctcctttatttgtagtaaagcctgtcatattatagtaactgaaacatagtctcgtataattgccaaggtggggttcacactcaatttagaatacaagctcggggactttgcttgattcatcatgactagaaccatgaggcttctccccaggctggctggggctctccgatatgcaggagatgggcctatgggggttctgactccagtaacaggcatgggggtctcattttaggattgtagaggaggaagagaagtttaagaagcaatgggaagaagactggggctcaaaggaacagctactcttgcctaaaaccatcactgctgaggtacacccagtaccccttcgcaagccaaagtgtaagtttcatgagccgaggggagaggctaagggaactagtcagaaatgctggccctccctcccctcaccaccacctcctagatggatagcccttggtgctctgggctgtggttccttcatggaggggcagctgtgggtcagagaccatctgccccagcatcgaggtaggagggatctgtctgctccccttgttcacgggccagctccacatacccagctcccaggtcccccacaacactgacatgggcaggctgtcaggctgctgaagagggaataagggccatagtgaaagtggattagctcatgggattaccgtcctaatgttttgggtaccatgtcctcctcctacttggttctgaacaggggctggggtgaagccagcagcagaaaagaggggaaggacctcacatcagagaagggctctggtggtccaaggttgattcataactgtgggaggagcttactaagtgtctccagcccctatatccctgtatgtggaccaaggatggaggcaggaacaggacaaggaggcctctcccagacacccagctatgggctgtggctgtgctgtcctggggcctcagctcatactctccttaccatctcctctcttcatccgtcccacatcctcacctccattttcagtctaagcctctaccacctgctccctgaccaccttctcaaccccagcttccatatgcctctttaagaggcagcccacactgccagaggaaaacggggaccatgacaaccacaagtccaggattgctggttgggtccttactcctgccttccagctgttttgacttatagttgacacaggacaggtcctactccagctgattgtgctcagctgacctgggaacctccagcaaggggctattctggactcaagagcccaggttccccatctctgctgtggggcagtcatttggcatgttgtgatggggtctggacagctctgtccccaactttgggtcacatatgagacctatgggaatgtcaacctgccaacataggccacttgcaccaaggaagaggtgcagggcatctggatggttccatttcacccctccctggtgcagtcaaacagctcccaacacatttcttcctggcagcagggcagtgtcatctcctggtcctctcagaaggacaaagcacactctcatcagcctcccccgtgacattcagtatcagttgaggatatggccagagctaagatcccaatgaatgatcgctgttttagacagacagctaatttgctcttacgagtgaaataggagcttcaggagagaaatcgattttaattgcttctcatggaagtaatcctagtcaatttggtaccttccaagaaattgggcctcagcttcacagcaaacacaccctctcaggagcaatagaaaataaaaaccctttcactagctggttatttatttagtgccttttaaacaaatcaagctctttgaataaaaagaccaagaattttgcatttgctcaaggtaaatgtgatcttaggcagctccacaaagcacaggatggatgacccccgcctgcccgctgagctgggacagctgctgcctctatctgtctctgtatgcaccagcaatttaattctcatttggacctaaggcaggaaatgcagtgaggtccctgagccagctcacctcctgcctcactccctgttccccggggtctagcatggtcagggctgagttggtccagcaggcctgggccccagccagctcctatccaaccacccttcaactcagcacccagtttgcaataggttatacctgactcaggcttctatgcctgcaaggggtgggccctgcttttttttttttcttgagacagagttttgctcttgttgcccaggctggagtgccatggcgtgatctcagctccccgcagcctccgcctcctgggttcaagcaattctcctgcctcaaagcctcccgagtagctgggactacaggcatgcgccaccaagcccagctaattttgtatttttggtagagacagggtttcactatgttggtcaggcaggtcttgaactcccagcctcaggtgatctgcccgtctccacctcccaaagtgctgggattacaggcatgagccactgtgcctggccccgggccctgcattttttaaaataaaagagcatggggcatctcttacctagaaaatgaagtcactcatcctaattatgtgcctgggactgactgccccccaacctgccccagggggcccttaaaattgctcctgcccacctacccgtggctgatccagcagacccccaacattttgccaagccctgaaggccaggacaccaccacagaggctcctaacagaccttcccttagcttaggcaggagttatgtaggtggttatgcaggagttgccaggggcagccttgactaaggatctggtagctgaaggattcttgaaagatggagatgtttaaataggacatctccaaccttctctccctatccaaggccccatcaactatctcccccacctccaccacaagagaccccacgatttggaagttgaggttattttcctaccgaactattaaataatcatttgtgttccattgttttattaagtagtccttgttagtaagggagcatcagggttccactgttgggtaaatgtaatttgagccaagagccaaagaacttaacagcctttgcataggccaatgggcaagttctgttaagcttttaaaatattaaaaagcagctcacaagcaaacgggtatactaccttccagagtcctagggaggccggaggccagagtccaagctggaaactctggaatggagggtttgctcttctctccacattatgtcaaaattcaggtcttcctaactgcatgtaccccttttaccttttgggatgtccccacctcctcaggaccttcagcctccatctgctgcccacactgttcagacatcccctagggtcccagagctccaaggcaagggtgataagcacaaggctggagggtctgttctcccattgcagccccttgccctcaaacgtgtgcgattctcagatattcccatcctcctcactgcacttcccagccttcagcccaataccctacaaaatggttctcatgctaccctcagatctgagtttcctgttgttagccctttgtacagacagaaaaactaaagctgccaaggttgaaaacactgtatgcaccagctcagagcaaaaaacctttgctctgctctcctgaactctgtcccctgcccctgacctcacagctcccatggaggaagctgattacaggtccccaaactcctgagaaggttctccggcctcttgggctcccaagtcccttttggttcaccagcttcctcctcttttccctgggtagatgatcagggagtggaacctgagctcgagcccgcagatgacctggatggaggcacggaggagcagggagagcaggttcgcgtccccgctttgctccctggcctggctgctctgctttaccctgcccgcctcctcctgaccgcagtgcagacacccagcttcaggggcccagcatgtgtgggggccaatagagtctgtaaagctcctccaagccccagcttggcccaagcactgtacacaaagcctagacgacaggactcaatgcccaggctggtagatcagctgttgcacactggtaccactgaaccgctggctcgaatatttagatattgccaaattccccctctgctgctctggcccctcccccaggaccccctagaccactctcaaatccagcaactgaggaggtagtgtctggtccagcaggaggctttcagcatcctgttccagcactcaggctggtccggggtgggtaattcagccatcgctcttggccccagggagcttcagattgggggtattactctgtggagctgcggcctggggaaggaagggggctggtgcactggctatctggcctggatgaggatctgttttctgggggcacatctcctgcccgctcctgctggagctgtccttccaagagctgtcccagccactgccttctctttgaatgttgaaagcggaggacttgacctgcactatgagacaagccagttttgttctgtcgaacaacagttctaggcagacacccaggctcccttttgtctcgagccattttttgtatggagggaccagacatgggttagaaaaggccttgttctctttcaacaaggctttgtatgtgaagactgtgatttggaaaagctcatccttccacaaggggttttctctttgatgttctggccctgacttctgaaaccagtgttctggggagaggcatttgagagtgacccagggcctgggaaccggggcttttctcggtggtcttaggcctgttctgcaaccaaggcaaggccaggtaagccgagttggacagagggtgcagttttgctgtcggatctgccaatgctgtttatctcacaaagtcatgcattccttgggaacccagctcccatctgctgcccatggatgctctggctgagctgaactgtgtctcatcattttgttatctgtgtcttatagcttttggatggttttatcgttacgatggcaaattcccaaccatccggaaggtaggacagggttgggtgctgtgctggtgtgctgcttagtttgctgtgggttttggcttttcccaaacattccttgtcctatcaacactaaatggtgtgacttggcctgttcacttggaaggctaactccatctccatctttgtgtcaggctgacatcaaatggcagggtgctgttgcaaaggcaacattgggagagggatccatggtgtgagacctatccaagtaccatctggcagtgtgtgcatcagcactggccctgatgggaacaggaaaggggcaggaagcttctcctgtgtttctctgtcaagtagaactagagaccaaggccagaagcttggggtcagacagagcaaattatcggagtgggtgtacctagtgcatgttatgagaccagctgtgccagacgcagcctggctgacgaggtggggatttgctgcctcaggttgggacagagacccactccaagcacagccctctcctaggaatatctctgcatgtgcccaggataatgcatttttccaatttctaggacctttaattttctctctaaatcttattacaatatctccaggccttgtaaaactctcttgtccttatctttctaaatcacattgacatttgattgtgaaaacattgctgttaatatctataattggacattcgagatgacttggtatttggaggtcaggcagcagcataaatctgggtgagctaaattggatgttatcacttgaccagcgctttctggcaagatgtcagtcccccagaaaccagagcactggcagctgagtgaccttgatgatatataattctccctgcctgtaaaatgggaatattaactgtgccaggaaaatctacccccttcctccagcacattgctattaaaataacaaacagtaatatttttcctgacagaggttaatgcctttatctaggaacatctatcaggatttgtatagcattgaataaacttggaacagagttcctctgggaattccttcacacattgtcctggtctcagaaaggccttggtctcataagactatctgtttcccttgacaggctgactttggtggcttaggatgcctcattgggttagatttctaattcttctctatattctgcctctactagaactcagctagagaggacaaaacacacacacacacacacaagcacacacacacatgcacacataggattttacttgaaaaaaataataaaggagacagatatgtcaaatctttttcaggcactaataacatgtaaatgtaaaagaactagaatcttctccacataccacctcccatcagaaatcatgtccttgaaagtgctgttgataaagaaatagggttgcctttcccctattccttaatctaattattccagaaacagctgtcattttggttttcattttcacttcaaaaaaaaaaaaaaaaaaagaattgcttctgggtagaatcaatagcacaatcgccccatctgcctcacctctcagtctggaccaaaaggaatattgtaactgacaggccatggatgtaactgacagctgaaaggacaacagaaccatgcccctcatactggctctgaaaacccgtcatcattttttctagagccgtgagagactctttgtctcccagcagctggaacgccaagtctccaggaaatgcaagtgggtatccatggccatgatatctgtgcataaattccccttatttaaaaatataaagattcagctcatgtctataatgccagcactgtgggaggccaagacaggcgaatcacgtgaggttgggagttcaagaccagcctggccaacagggtgaaaccctgtctctattaaaaattcaaaaattagctgggtgtggtggcgcatgcctgtaatcccagctacttgggaggctgaggcaggagaatcacttgaaccctagaggcagaggctgcagtgagccgagattgcaccactgcactccagcctgggtgacagagcaggaccctgtctcaagaaaataataataataatataaagattcagtgtcttctatttccaccttggcagtaaatccctctggggctcaaggttcccaggcctttggccccacagaatttgtgccagggcatgaaggattcatgattctgactaagccctttcatcagaattgcttgagtcactcacacagaccagccctacttgcaggagcccaccgtctggcagggaaggcagattcacacacagctaagtaacctgtgtggggccagtctgagatcagtgggaaatgccatggggcaacttgccctctgcatctgtacagatatgactttcttgggcatgagacagaaactgtctactaccccacccagaagccctgactctataatcttagcactggtagttttttttttctttctttctttctttttttaagcaacagaatggccattattctcgtggtggtcctggaggaggccaggctcttactctagcaagctaccattaggcagtgtttctggctcctcttgggaaattgctgtctgaatctctactacgatggcagggattcatctatcaactgagtctagtgaacaaggtaggcaaggaaccaagcaggactctgaagcagtgagaaccattttctcgagaggctcatacactgctctggaggtgggtcccagaggtgaccatttccagagcacattagcagtacacagaggtgtgtgtctttaggagaggagctaggaagagtccctcagaggtccataatggcccaccaagtccctccagctgtggatgaatgttgtgtgtccattgctagggagctcaattccttattcctggccttggatactaagatgattcagaaaattcaagagcagatccccagaaggcttgttgggggcgggggtgagctcagtgaacagggggtttcctccttgccccagaaattgcccagggtgtgggctgtctctgctgcccctctcctgaatgctcgctctgtcctccacgctgtgtgtgataggggctgaccctccctcctgccgtgtttcccttgcccccagctcatcagggcaccatagaaaaactaggacctcgaagactcaggtccaaatcctggtactatcagttacaagatgtctgacattgaacaagggactttacctctctgagcctcagctccttcatcaaagaatgaggataaacctacataggagatcattggtataaatcccttggcacataggcagttcataaatgatcattctcttcctgccttagcccctggcttccctgcaaccccatgagagaagcagccaggaatgcaggctcggtgggtctaattcctacaggaaaaataaggagtctatttgcctttcatgtccctccccaaatcctctagaaccctgatggtgagtgtaaagcagttaagccattctctccatgccctgcctcccagtcctgcagtttccagctagccctcggtagaggggcacaattcagaggaaactgtgggtctagactctccagggtgaaatggtccagagcttaagcatgcgggtaaaatctgatgtccctgggtctgagcccccaggtctcagtgtgactcctatcacttctagcttaggacgggacctctacagatgaagcttgccagccctcccagattttctctggaatctcccaggatgcatctctgaatctgaacatgagatgatgcagaaggcatgtgccagatactggaaaatcagcacaatgccctttatttatatggcacttatttatttttttattttattttttatttatacagaacttttacaaagttctttcatggatgttatttcattggcactgggtggcaagcctgtgggggaggtatttttaccattttggagatgaggcaaatcaggcccagagaggttaaggaacttagccaaggccacacagctagttagtgaactaataagccagtctttctggctggtaaagagaatgtgtctcccactctgcagtaggtagcagtggccttcctgtcctaaacctgaggtctgatgtccagagtggtgagagagctgggggaggggctcaccatgggatggttgtgttatgtgaggactggatgccccgtgtgctgtgctgtcgacactatttctaacctttgtcatataaacaatgccacatctactcagaaaggaaaagataagaagaaagccaagtatggcagcctgcaggacttgagaaagaataagaaagaactggagtttgagcaaaagctttacaaagagaaagaggaaatgctggagaaggaaaagcagctaaagatcaaccggctggcccaggaggtatgtgtcctgcctgcaggccaggcaagcaaccctgggacacaatgtggtcgttctccatgtgctcccagaggaccagctggagttgttctcctcaaatggcatacaagggtggagtgagccctttcctgctccccagcctggagagagagatcatgccacctgcccagggccatctgaggttagctcctggcttaggaattgaaactaatctccttgcttgggggtgtgagtcttgctcctggctttggaattgaaactagcctccttggtcggggggtgtgagtctgaggttagcctttctgaccagatggtaggtctcaggttagcctttgatacacctggcttagagatttgagtctgtcctcttcactctaccccaccagagtctaaggctgggcctctccatctcaggtgtggctctgaggctacttagagtatggtctgcggctaacccttctgccttgcttgtagctttgaagttaggcttccactgacctgtctacgagtctgaatcactctggcctcccttcccaggttattgtaagaccagacccccccccacccaacttagcttggctctgagaatatgggtctgaggctaacccccttatgcaggtggtaggtgcgaggttatctcccaattaatcaggctatcagtctaaggctgctcccctcaacatagggtgtgtctaaggctagacctcatcaacctgggaatatatctgaggctgtccccatgaagacatgtccaaagcaaccttacaccatgaataattcctatgctaggtgagatgggtaaccttaactccccagctgtaggaggtatcattgtttctgcttctctttaacgcatccatgaatcagaatgccaatttgattagattataaaaccagagaagtcctggaaaatgtgaaatgcattaggtctgacattatgaacaaattagccacaaaattaaaaataagattgaacttatgcttctgagggcaaggcagaatggagcaggaaaaaaaagagtcaagttaaactcttggaatgtgctgggggaggctacaaaaactccattcttggaaaatcataagagcctcagggttcatggggatctgggatccagctaatccctcacaatacataagccccttttctgattttgcctacaagttctgcttagtgaatttgacaccccgccactctcttctcccttgctgctgcctccttgagggccagttggaacaagcccaggtctctttctagatagctgatgcacctcacagtactctggagtttctaaaggagtgctttcatgctatttctatccacatgttattcaaatgtgccctttgtcctctcctttctgcgccgatcctgggtcccaggtgtctgagacagagcgggaagaccttgaagaatcggaaaagattcaatattgggtggagaggctctgtcaaacgcgcctcgagcagatttcctctgctgataatgagatttcagaggtaacagagcccttctttccacatagaccctcctgctgtcttcagaatgacccactgtggggacagcgggaggtgagatgacaactagcaaacgtcactagcctcacagtgcccatccactgtccaggcccacccctaccaccccactcccctcttgaggaggagggatatgtctgtatttctgggtatactcccagagtgatctctaagtcccagctcatctgcgatagtctcagttaggcctgttgtcctggcatcatgactaagagtcccccttacactctcaagggcattccagtttagagaatgaactctgtgaacaccttaccacccacagatggcataacttggggctcttctgcatttgggcactccctaacagcagcctagtatggcctcagctgggcatccaggtggcagaggaatggcgccccatggttctgatgtaagggtggtgggtctccagtagcaagagaaacagattagaagagcatagtgctcgctgtattgtgaagtggagctctaagcagagtgacaattacagaacttccttgcaacacccccagatgaccacagggcccccgcctcccccgccttctgtgtctcccctggccccacccttgagacgcttcgcaggcggactgcacctgcacaccactgacctggacgacatccctttggacatgttctactatccccccaagactccctctgccttgcctgtgatgccccaccctccaccctccaacccaccccacaaggtcccggcgccccctgtccttcccttatctggccatgtgagcgcctcatcctctccatgggtgcagcgcactccaccccccattcccatccctcccccgccatccgttcccacccaagacctcactcccacccgcccactgccctcggcgctggaagaagcactgagcaaccatcccttccgcactggggacacaggcaatccagtggaggactgggaggcaaagaaccacagtgggaagcccactaactcccctgtccctgaacagagcttcccacccaccccaaaggtaatgtccctgttctgcatgctatgtttggaagtaggaagagtggggagaactgctgtttcccatgtcctccactgctcctgagagtggagacagaaagaaacatcatctcaccccattttccaggaatgccccctccgtgtgcatgtgtggacatcctgcatgtatatggtggttctcactgattttgaagtgctgtattgtatggtgaatggcctgggacctttggggtaagcaacggtgtgtccatttgatattcattgctctctcttagctcttctttgctagtgtaggctggtaactttcaatgtaggacttggaagtctatgttaatgaatagccagcactctgtcacatccagtcacttcctgatattatcccagaaagccttgaatatgggaaatggctcctgatttaacgggaaaaaaagggaggggaggaggaagcaggggcgtatttggctctgtaaatgaagtgataacactgtaccatcaaatgcagtattaggacattccagtgccattttctacagtactggccaactgcactggcttgaagtgtaatacccagaaatttctggccaatttccagctatagaaaaaatgaagatgagagagttcctagaaataatttactattaaaagaataggaatgtttttcttggatgttaggaagatgaacagtgtctttctgaaaaagacatatttcttattaattattcgtaatccaaagactattttgaaacatgcaatctctgaggaagacagggagcttggatcccatgaagggaaaaacaaaatattattccactcccgtagccatgaggccaggcttgagtcagtgcaaaggcatctcatgtcagctgagggtagcaggggttgctgagggagggcatagtcaatagcacctgaccagtggtttttattaaccttccctgcatggatttgagttcctgcgtggagagcaggacaagcatctcagagcactcaggagagcttacaaggaaggtgggagtgaagaaagtgccagatgccagcaaggctgaagcttccagcgggagactctcagagggaccctttctggacctctggttggggtcgtgagccctgcagctttgacaggaagaaatctgcctgttctcgggacatctttccccagagcccagccaggagctggtttctagagctgagttagccttgcacaacatttttctctgtaagtggcctccatcaagatgagcagtagcttttcctcaacaaatttgattccactttgattgagtacctgcctggggcctctctctgtgaaggggagaggggagcagtgctgaagaggatgcagaggagattgacatgcctgtgctttccaggactttgccatctgaaggatgagctgctgcccaggcaggcttctgctataaaatatgcataagccatgcgctatgggagggattcattctaactgaagattgaagacacctctgtagagtagagggcttacgagctgagccttgagggatggcaacacatggaggatgggagcaagggcattgcaagtgcagggaacataaagatggcaagttggagtagcagggagttggcctgcctgggtttgaatcctggctgtgccacttactagctaggtaactgaacacatgctacttcatctatctgagcctgggcatccctgtccaaaaataggaatgctaatggcagctacctattcgaatcaaataagttaatacatggacacattctaagttaagaatggcaagagtggcaggcacatcgtggatgttcagtagacattaactatggttattgatagtccagagtaaaagaaaatttgggtgaagctgcaaacctgggatcttagcaatctcagtgtcagcaaaactttgagtcaggatcaagattcaagacagagtccagacttctcagattcttcaaggcatcaccaagttcccactgttagttcctgatcagagcccagggaaggttaaaagccccccaacacaaggagcctctgaagaactggactataaatgtcacaagcgacatcaaagccagggttgtcccagcctcaaaagccagggggctgttgcttggttggcttcatttggcccacctctcacccttgtaccacccaccctcctcctccctgcatgcccctggcaagctgtcatcagtgctgcagcaggaagtgtgagtgaccacacgcccacacagtcagcccagccaccagcaggccccaagtcatggaaacaaacacctgtgttggcttgacacttgtgcctgccacaccagcaccggccataggggggttttcagggccagatctatccacaggcactgtcccatgttctcaccatactatttagtcattcatttattcattcaacacatgcttattgagcacctactatatgccaaggcactatgcagggcactgggaatccctgctggatagacagctgcagtctcccttctcaagacagtctggtggggaacaaagaaaagtaggcacccgccacaccatcagcgtggagacggaggaagcacaggtgctataataaggaagagggctggagtagaggaaaagctcaagggaggcttccagaaggcagtgacgcccaacttaagacctaggaggcaaagcggaagaaggaagagcacgtgcaaaggcctcaaggcaagaaagcctggcattttttgaggctaaagctaggcagtgtgaggagcgtggcgaggagtgagagataaggctgaaaaggaagctagagaagctcatgaaaggccttgggagtcaagccaatgagctcagtagtcaatgcggacactggggagggtttgggggcagggctgtgaactgatttgatacatcttgcccaaaaagatcaagtgggttagagccaagcagacaggttgcgtcagctcccctggatgcctctcttactggtcttcaccccatggcccctagagactatgtgcctaccaactaggaacagcagatgcttcacactgtggtccagggactggaactgtggccaaagagacagcccttaaagacaagggacactggatagcacccatggccactgagagaagggtctgaaagtgtgtctcctgggtgacactggctgctggcacccccaagccaggctctagctcaagcgtccaatttcttagagccgctcagtagtttctgtgatctcagcccacactgtggccaatgggcttctcatctctctgctgaggatcacaaccccaggacctcgagcagttgaatgaccaggctggcttcacatatgcatgggtgtagatttgcatgtgtgtagaagtagcatggctggccttggccaccccaccatgacctcacctgggtccctgttaaactaactccttagacattttgcccaagcccacagcctccacgaggccctggcgtgtccaccatctccaaacctgtcatggtccaccaggagcccaatttcatctacaggccagctgtgaaatctgaagttctggtaagccccttgggtcccctccaggttgtctctagaggagcagaccagggctacctcccctgggctctgctgtctctggagggcaagtgaggtgggacaaaaatgcagatcacagatgccatctcttaaccttcttattggccaagagatgaggccacatgggtgtaagtggatgttgacatgaccagtggaatttctgttccccacttgactgaacagcctggagctctgtctaaaagtaataatgatcgctacgacctgtgaagagcctactatataccaggctctgcatggcctcaattaatcttcacagcaggactgtgagatggttcctgtggtcatcctgtttaacactcgaggaaagggaggtttagagaggttaccagaggggcaccaggttccccaggcagagcctggacttaatacttaccctcatgcctttcatactccaaagcccacgctgttaccctcgttgccatcttgccaaaacctacagagattccaggtgccctggcccctgccctaaggcctgttgtggcctggcatgaaacaccctcagatgggaaactggccagagcaggttcactccctttctccaacttacttctcacctctcactgtgactggaagtctgaggtgtggtcctggggaagtgagaaatgtccgccagtctcagttactgacggctaagggagctgggattcgtgtgcacctcccagaggtgccgaccactggctggcctcccatgcacagtgagaagacagtcatgtcagaattttaacttccctttcaaggaaactctatccaaatgtcagggcaggacagctgagatatttattttgggccttaactgtcccgtcagctccccagagagcaaagtttttgctcctgggacagcctgcggatgcatccatgtcatgttctctggctaatatcaaggggtggtgtctgcttgacaacaactgggtagcatctttgggcattgagcaggcctttaacgtaagccagactgctcggggagggacattggcacggcagccccagactggcaggcccgaagcctggcaccagggggcagccaagacctattggtaacatccaatgtggaacttttttttttttcctctggcagccacaggagatgttgaagaggatggtggtttatcagacagcattcagacaagtaaactgatacccattgtgtgtctggaggtctccccaccacccccgtccctcccactctgtgccacttctttctctctgggagtacctggtcaggtccatggtggccccatctgccaccaagcctcaggccagagctgtgtcctccattgcctgcgcaggggtgggggaggatatcatatcagatggggacccagggcttattagaccccatgcatgagctgagaaacagcagtatccctgggaactcacctcttctgctgctgtttgtccagagaggagcagggcagaaggaaccctcagaggcccacagaggccaagatgggccctcgctccagccctaggagagagggaaggggctgcttaggtgtctccctgtaccttcccctcttcttctccgggcagatcacagcttcaccaaccctgcctgacactgaaccagcgtcagggaggaggtggtggctgaggtcctccctgtgcctagggcactcctgtgcacagggacgtggaagtccttgctggtcctctgagtggcatcaggcaggcagccacctacctccctgcctcctggggtacctccatggagccaaccattggattggctgtttcatcaccaatgaaagaaaccccaggacagagagagatcttgcagccagcccaggcttctccagcctcctcactgataacccaccaacagaccacaagctgatttgactacaggcagggagcagaggggcagtatcaactgtgcagtgagacataggtgttggcaaaagaggctgctcccagcccaaggatttgtcaatttaatctttccagcaaccctgggtggtaagtgctattatcatacccattttatctatgagaaactgaggcagagagatttgaaaatgtgcccacgatggcacagctaatgtcaatccctggatttgaatccaggaggtcggtctctgcagcctgtgctcttaaacactgcaccatcctgccttaaagcactgtcgtcacacaagaggccttccaggacctggcggtttagggcacaaacagccctcacagggagagaagcagggaagtgcagagtctaggctccagaggtggagtcaaacccttgctcccctgcccactgactgggtgaccttgggcgtgaatatcacctctctgggcctcagtttcttcctctgttgaatgaggggttgggctgcctctttaagggccaaccagctgcagtggcttatgagtctctgatctaaattcacacaaaacacaagtacctgccatctggcccatccctgagagctggttctcaggatcatggagcaaggaggccagagccagcactgcccagccttccaggagaaacagccggagtaggcagggccctcaaagtcaaagagcatcgactccacatcctgcccaatgatccttcttgcctgtgcattcactgcaccccctcctctgtctgctgcccacacactgacctggatgtagctcccaagctgagccgagctcatggcctcttggggttgagcctgggtgattgaggcaagtgaggagggatgccaggcagatgcttggggatctgtctgctgatatttggtgctcatcttgtgcccggaacctagttggtgcattctgaggataggggaatctgtagcctccccaccacacagaccatgggccccatgggtcacttggtgtggtctagggacctgcatgctgtgggtggctccactcagtctggcgaggcctgccacggggctctcctctgctcccaccttccatggggaccagccgtggctctgctgcccttgtgcttagcatcctggcccctcagcctggggatgcccctggctcccactcactgtgtgtgactcccgaggaaggccacatagttcagggactacctcactgtgtgttcaggtgccacctcactgtcttgtttctacaccctggagccattgtccccacagcatcccccatcaagccaggtcccctgagctgtgtgtcctcccttctcccctagctaaagggccaacctgcgctccgcagaatctggggaggcctcttaccttctaggtaagcattacatgaggacactgccaggctccaggccaacactgcttctcaacaccacctgctttcttcttgttgtccgtgggctccctccaccatcttgtggctgatttccaggaacagccttctcttgagctggatgggcccctcctgtggggtcagagcactgggtggagacaccttgggcttcatcccccagggcctgggcctgctccagtggagacttggaagagatgaggtggggcctaaaggacttgaggctggggctgagactttcagcaaggcagatgccgcctctccagaccatctagacgtcactggtgcccctgcagcccctgacgcttgtgccgctgaagcagggcagggtcaagatcctctaaagtcttcctcagcctcctgcttgtccctgaacaggggtgccctggctgctagggctgccggcctcctgtctgcatcccgtaccctggccgtgccttctcccgccctacccctcacttctgacccttggattccgaccattcatccccctactcctcggctctgaccctcaagaccctctgctgtgttgccctaaagccctccctttgcttccaggatttccggaaatatgaggaaggctttgacccctactctatggtaagagatgacgcttctctcctggacaagtaaccccaggaacagggcagtgtgggggttagagggtttgatagtggtgcattctgggccttggggtcctgggatgaggtggggcacagaggagccccagtgatgccccagctgctcttcccacgaagattccttccaaagggcactccagtgtgaactgtatggtgcacatgcacgtgtgtgtgtccactgtccccatggggcctgggacccccagttgaagaccagtaggggtggggctgggcacggtccccttgcccatgtgctctgtggggcccagtgtcccataggtgcctggattccccttccagccctaccccaagcgccatccttcaggccagctcaaagcttcccactgtctttttctctctagttcaccccagagcagatcatggggaaggatgtccggctcctacgcatcaagaaggtacctgggcatgtggaggccggtgggccgccatccctctctgtgcctgcccctcctcccttggtctcctgcctctactctcaaggtcactcctgggtggtctctcaggtccccactgtcctcccctctcccacggagacgcccctctgttgtagggccgcatacccaggccccacttggcaccaaggctgcgttttctccagatggcactgccggtgaccccatggcttcttccactcttactgtggctctgtcaagagactccttggtgcccaggtgtccacaggctgctgtctgcttggctccctaaggcctgttttcctctaaccaggagggatccttagacctggccctggaaggcggtgtggactcccccattgggaaggtggtcgtttctgctgtgtatgagcggggagctgctgagcggcatggtgagtggagactagccacacccaggtttggggatgatacagtggttagacggggccctcccggaaagcaaacaggtgaccacttggagtgggctgacggttgctggagaatgccctcccactcgggtccatccatccgactgcctgtccaatccctgggggcatgggatggcgccgggacctgtgagtacacagccaagccagatgccaccgtgccctcagggggtccccagccagggtgggagacggactcagaattgccagatactgaaagtcacagcatggtctgctaagggctgacggggaactcagagtggagggaagccatgggaaccctgaggggcctctaacccaccaagaggagatgggaggccaggagtgctcctcagaggggcgaaccctgagctgagcatagtcaatgtcagcctcgcgaaggggagaaagggctttcgaggaagaggagcagcacgtggaaacccccgaaaccttgcctgtcctttcagtgatggtaggagccgaacgtttggccagaactagccatgtgccagaagctattcatctggtttgcagccctgtgtctgagcgtttcatggatattaactcacttaatcctcacaacaaccctgaaagcaggttctgttattattcttattttacagctgaggaaactgaggctcagagaggttaaagtatttgttcaaggacccacagccaggagaaggtggaggcaggacttgaatccaggcagtttggtcattttgctttactgtccggcacaagtgccacctctgtctgaggtcttctgcagccttgtcccttcccagagggccagaggcccccataccctgtgtctctcttctcattttgccttgttctttatccccttatctacaaaaacaccctctgctgatgagtgaaacctttgcagaccccaggcacagtctcttgcttcaaaccatcaccccgttcacctgtcggacagtgtctgaaaccccaccattggtgatttcttcttccatgtcaaggaagctcctgagtcctttgtggccctttgtggagatgtaggtgcccttggaggaggagccccaggcctcttaccttcccaggccagagtgggggaccctatgagcagatcccttccaggcagtcctaggctggagccaggctgtaccataagctggaggtggtagaatggaggtggtaagaggtaaggggcaggaaacagggatgggaaaggcccttgggggctggcaaccagacctctgtgggttactaaggtgaggtatgggcattgggagccctggatacaagtccagctctgcacccatgaccttggtgacttcacactttaagctttcatttcagccatagaagggggacctgcccagctgggcagctgccccagcccatcagtgcccacccaggccccaccttcttcttctgtcttcatttctctgtcacctggtgacacttctgtgatacctgcctgctgtgtctagcagagagaggggaccaggatggatgggtgactctcctgggtccttcccacttacaaagccccaacccaaccactgccttattgcccctgagactctgtcatggatttgtacaaaatgaaaaggtgaaagtcacccatccccagttgcactgcacagaggcaactgctttctgtggtttggtcctgcactgctttgaacataactagtcactgatgaagcttccctaggagcacgtgtgttttaagccaccatggccaccattgtcagtatcatacaccacattcctatgggccttcatgccacaaggctcctgggtgatctatttcaatgtaacctggagagtgttctgtggacatcaggactgggagaaattcctccaaaaagggctctgatgtcaaagaggtgtggaaaaccacgcacaatctgtctacctcttggaaagctgcagtgcatgttagcacattcaagactgacaaatcctgcagtgagtagctctgttcagcttataactcagctttccccaaaattattagatcccaggcaactctttcaggagcaccttattacagcttcatttattcaacaaatatctactgaggtcctattttgtgtcaggcattatgttaagtgctggggatattatggtgaaccaaaaagacaatccctgcccacgtggagctgacagtgtggtgggagagaccatcagtaaacaaacagattaatgattacgaattgtggaaaatgccaaataagaaaagattgggatgctgtgagagaataggcaagatctacattcgactgagcgggggtcagagaagccccttctgacatttcctctcagacctagaagaagagaaagcaaggtagggaacagcgacatgaagcctctgaggcaggagagagcatggcagctcagggacctgaacagaccagcatgactggcaacagggagggccggctggcagaattgactcaggcctcatactgtgctggaaatgcaggtctgtgtccctctgtaataacagaggctcatcatcaatgatatccaggttctcctgagctggggtgagggggtgtggaagggacagggactaaatgccctttgactagccactaaccaggtggctagtttcccctcatgctttctgagtccacatgagctttcagaacccaggctcaggtctcttctgctgtctggcaatgacccccctttgccaagccctgggccaggcacgtgtcacatacagcccagttggccaatcagcctcatctgcctgcaggtggcattgtgaaaggggacgagatcatggcaatcaacggcaagattgtgacagactacaccctggctgaggctgaggctgccctgcagaaggcctggaatcagggcggggtaagaataaggcccctccctcctttcctccctcacctgcctgcctcaaaccctggcctctgcagccaggtctcacaataggatgcctcattccagggtgggcatctggagtccaggcaacactttggtgacaccataccccatccagcctgtggtttaaatctgacaagatgggattcagaaaaatagatgtcaattcctgaccttggatccaaaaagccagtggcttaaacagactcttgaagccagggcatggcaggtcacccaagaaaaagacttaaggtcttttctaagtgcacactgaacaagaatcaagagaattctgggggctaccagaaagcattaacaaaagcagagaacccaggatgaaggaggggctggtgggaatctgctctgcactcattagacacccacctggatcacggccactgcataagattgcccaggctgtgcactacataatctgagggggtgcccttttacagactgtagtgtgaatggtgcctgctcatggtgtgcaatgcacaacctgtgcaactgtatgcaggcagccgagcctgaggtattaagttcagtgccgaggaagctgaccagatgggcctgggacccacatgaagggatgtggagaagagaagactcacgggtaacatgatgactatctttgattatctgaaggtctgcattagggcagagggagcagaagtgttctctctgattcttgagggaagacctggattggatggagggaagtcctggggaaagagagagagatttcagctcaatattaggaaccagctcatggtagaggggcccagtgatatttccaatacttttcaggggatacacctaagccaaggagggagaatgaggggcaagtcaaggatggcagtaaaagggattcaggtgttaggatcaaaaagctgggccagaagtcccccacttgattgtgcatcagaaagtgcgtcggaattacccagagaggttgttaaaagtactatttcccaggactcacccttgacttctgggggccaagtctacgagcctacacttttaagaagttcccccaagtgattctgaggttgctgcctgtccccggtccatagattgacatttgggagctgagtgtcattcaagggccttgcagccctgtcctctatggtcccgaagcctcagagactagaaacgtcctcagaccatggaagtcacagtgggccccaggtgggcccgtgggaagaaggtgcagcctggctgatcctaggccatggggcccagaaatggggatggagtgccggggcagatgcaccatccaactgagtgtgccccagagtcacacggcttctccccacaggactggatcgaccttgtggttgccgtctgccccccaaaggagtatgacgatgagctgtaagtgtgtgcaagcacctagcctgagacctcttcttccttctccagaatctcagccacctttctccagcccatccccagccttctcccagcctgaaggaatggcccaagcacgcagcttctcatagccagagctcctagaaaactcctggactagagccaagtcattgtccttaagcagtgtctgagctgcctcccgggcagtcttgtccaaattcttctctactatggggaattgaggcatgaggtcttagaccgggtaagcagagacgttgggaaaaagactcaggattgttaattccccactcagaactttatcccctgccccattattagatggttagaaggtgtctgtgtccatccttcactctctggaaggtcttcctgatgtctaactgcattcactcatactgtgcctctaggcagccgggaccacaggcttttgtccccacgctgtgggatctccagggagctttggcctagactgtctctctctgtgattccctgtgtgtctgtctcttgtgtcctgtgggtctctctgtcttctctcctcctccctctctgtctttctttcaccctttccttccttcctgtcaacatcttatctgcccccctccttccccttcatcccggtcccctttctctctcactgtctcctattctttcttcctgtttctcttcatccctgtctctgagtccctgttcctctgtccttgtcattctgcatccattcttacctctttgtctgcctttctctgtttctctgcctctgtgtggtgtctcacctccatcctcacctcatcccatcacctccccagccctcacccacccaccactcacccactcactgaccatgccctgcctccctgtcgtggctgggcctgcttgctccccgtgcccagcagaatctgagctctacacatgtcttggagaaaccagggtctcgcagctcctaattctggaacccaggggctaggcagaacccgaggcaggagcccagtgaaaggagaagccccatggagctctgcctgggagtaaccaagcctgttttgtgtttcttgctctgctctgtatatatagagcttctcttccctcctccgtagctgaaagcccccaaccggtccgaaagctccttgaagaccgtgctgccgtgcacagacacgggttcctcctgcagctggagcccacggtgaataggcaggcgggccacagggccctgtgtgtccctgctgcttgcagtggccatctgctgcccacgctgtcagcaggttctttggactggcgtctggagggtacacaaggcgccatccctgaagtgctgcctggggcctgctgttggccacagtggaattcctcagactcaaagccctcccctcagggaagtggtgcaaagcccagtctgtagtacttgcttgggacccaggtgtcctgactcatcacggccctgggacctgctttgggtcccaagcagcacccaaatgagcaggatgaagccctgggcaacattctctgagggacacagacaatgcctcgaaccaggcatgtggggctgaaggagcccacaggaagcctggctggaattgcccccaagagatgtcctcaacagaatgtgaaaattccccttcctgtgaatgccaacctcctgggagctcttgctccaccatggcccccacacttggccagaaccagggctattaagaggttttgaaggctggtccaaagaaccagggttggtggattagagttgctcatgtcctgttgtgccctgtcatggcctgagccgtgcttagaccaaacggtcttctctgccttctcccttccttggctctgggctctatctgtgggatataccgtggaacccagctgtaggatgtgtttctcaccctgtgatagggatgtgcccgtggacagagctggcaggtggctgtgaaactggtgtttggtgtggcctgaagccacagatggcagcatctggggcagacccaagcctggacttgacttttctgttacaactttcccaaaacattagggcctcatgctcccaagacacttggccgggtagaccatggcttctggggtggcctgcatggccctatgttttctgttacttgccttttgcaaaggactcttgcccctgttcctcccagtctcctccttcccccatcccaggtgtccctcccgctttctccctggcctcctgtgtgctgtggctgtggctggtgtgtagccacttggggcctgcacccagaggggtctccaaagggtggcagggccttgtgctgccagagtgggtactcccccttgtggggccttgctctggctgggctgagtgtgcacccacaaagcctgtatccacctgggctgtttccacttccctgcaggaccttcttctgaagtccaaaaggggaaaccaaattcaccgttaggaaacagtgagctccggccccacctcgtgaacacaaagcctcggatcagccttgagagaggccacactacacacaccagatggcatccttgggacctgaatctatcacccaggaatctcaaactccctttggccctgaaccagggccagataaggaacagctcgggccactcttctgaaggccaacgtggaggaaagggagcagccagccatttgggagaagatctcaaggatccagactctcattcctttcctctggcccagtgaatttggtctctcccagctctgggggactccttccttgaaccctaataagaccccactggagtctctctctctccatccctctcctctgccctctgctctaattgctgccaggattgtcactccaaaccttactctgagctcattaataaaatagatttattttccagcttataggagtgagtgtggatttgggcagcagattcaaggctgcaaatcaaaaaaccataaggtttgtggcccctattcaagggtgatagacagatcccagtgctgtgatctgggtctgacatgaagggtgtgatcaaatggccagggctggcttggagcagaggttgagaaagcaggagatgggctgggctgggcttcaatgtcttctcagcagagatggtaggagatgaagtctgtgtggcagggattttgctcaattccagaaagcagagctgaaggcaggagccccgaagggtcacctcatgatatggggtgcccagcttctttcaagaacgacacagccaccaatgcttctcctgaggtcaccacgacagcatgtgagggaggaagatggcagggtccactccctccgtggaagcacatcccacagaagctcatgggaaatgcaagggcttgaggcaggaaggcataactccgggggcccagcagggggaatgtcacagttcttctggtgacagggaccagggctgctagctctgaggaagagggtggggctgtatcagcacgactcgcctgaccccgtctctgtttccccattccaaattcctgtggtacaatctgatcaggccaaatcacctgagcgggcgacccttgggttagggaccagtcacaggtccaatcagctgtggccgggggtggggtcacatcccacccaacatggctgctgaggcagcaaggaccgtgggcagcaagtcatgatcaccacccctaccagaggatgactatgacatctctcctcccccaccaaaccctgggtatggaaaggaagtggactggggtcccaagggaaggcagtcttagggagagtgcctctgtgtgaggggaccacaggaaaaccccttcctgaggtgggacactgcagagagcccctcggggacacacccactgcccatcccccaggttcagccctatgttcagctgaatcccccacttcatcccacagtg

SEQ ID NO: 95 - DNA, 2237 bp, Homo sapiens
agctccgagggcggctggcccggtcgcggtcgcggctctttccagctcctggcagccgggcacccgaaggaacgggtcgtgcaacgacgcagctggacctggcccagccatggaccgaaaagtggcccgagaattccggcataaggtggattttctgattgaaaatgatgcagagaaggactatctctatgatgtgctgcgaatgtaccaccagaccatggacgtggccgtgctcgtgggagacctgaagctggtcatcaatgaacccagccgtctgcctctgtttgatgccattcggccgctgatcccactgaagcaccaggtggaatatgatcagctgaccccccggcgctccaggaagctgaaggaggtgcgtctggaccgtctgcaccccgaaggcctcggcctgagtgtgcgtggtggcctggagtttggctgtgggctcttcatctcccacctcatcaaaggcggtcaggcagacagcgtcgggctccaggtaggggacgagatcgtccggatcaatggatattccatctcctcctgtacccatgaggaggtcatcaacctcattcgaaccaagaaaactgtgtccatcaaagtgagacacatcggcctgatccccgtgaaaagctctcctgatgagcccctcacttggcagtatgtggatcagtttgtgtcggaatctgggggcgtgcgaggcagcctgggctcccctggaaatcgggaaaacaaggagaagaaggtcttcatcagcctggtaggctcccgaggccttggctgcagcatttccagcggccccatccagaagcctggcatctttatcagccatgtgaaacctggctccctgtctgctgaggtgggattggagataggggaccagattgtcgaagtcaatggcgtcgacttctctaacctggatcacaaggaggctgtaaatgtgctgaagagtagccgcagcctgaccatctccattgtagctgcagctggccgggagctgttcatgacagaccgggagcggctggcagaggcgcggcagcgtgagctgcagcggcaggagcttctcatgcagaagcggctggcgatggagtccaacaagatcctccaggagcagcaggagatggagcggcaaaggagaaaagaaattgcccagaaggcagcagaggaaaatgagagataccggaaggagatggaacagattgtagaggaggaagagaagtttaagaagcaatgggaagaagactggggctcaaaggaacagctactcttgcctaaaaccatcactgctgaggtacacccagtaccccttcgcaagccaaagtatgatcagggagtggaacctgagctcgagcccgcagatgacctggatggaggcacggaggagcagggagagcaggatttccggaaatatgaggaaggctttgacccctactctatgttcaccccagagcagatcatggggaaggatgtccggctcctacgcatcaagaaggagggatccttagacctggccctggaaggcggtgtggactcccccattgggaaggtggtcgtttctgctgtgtatgagcggggagctgctgagcggcatggtggcattgtgaaaggggacgagatcatggcaatcaacggcaagattgtgacagactacaccctggctgaggctgaggctgccctgcagaaggcctggaatcagggcggggactggatcgaccttgtggttgccgtctgccccccaaaggagtatgacgatgagctgaccttcttctgaagtccaaaaggggaaaccaaattcaccgttaggaaacagtgagctccggccccacctcgtgaacacaaagcctcggatcagccttgagagaggccacactacacacaccagatggcatccttgggacctgaatctatcacccaggaatctcaaactccctttggccctgaaccagggccagataaggaacagctcgggccactcttctgaaggccaacgtggaggaaagggagcagccagccatttgggagaagatctcaaggatccagactctcattcctttcctctggcccagtgaatttggtctctcccagctctgggggactccttccttgaaccctaataagaccccactggagtctctctctctccatccctctcctctgccctctgctctaattgctgccaggattgtcactccaaaccttactctgagctcattaataaaatagatttattttccagctta

SEQ ID NO: 96 - DNA, 3246 bp, Homo sapiens
agctccgagggcggctggcccggtcgcggtcgcggctctttccagctcctggcagccgggcacccgaaggaacgggtcgtgcaacgacgcagctggacctggcccagccatggaccgaaaagtggcccgagaattccggcataaggtggattttctgattgaaaatgatgcagagaaggactatctctatgatgtgctgcgaatgtaccaccagaccatggacgtggccgtgctcgtgggagacctgaagctggtcatcaatgaacccagccgtctgcctctgtttgatgccattcggccgctgatcccactgaagcaccaggtggaatatgatcagctgaccccccggcgctccaggaagctgaaggaggtgcgtctggaccgtctgcaccccgaaggcctcggcctgagtgtgcgtggtggcctggagtttggctgtgggctcttcatctcccacctcatcaaaggcggtcaggcagacagcgtcgggctccaggtaggggacgagatcgtccggatcaatggatattccatctcctcctgtacccatgaggaggtcatcaacctcattcgaaccaagaaaactgtgtccatcaaagtgagacacatcggcctgatccccgtgaaaagctctcctgatgagcccctcacttggcagtatgtggatcagtttgtgtcggaatctgggggcgtgcgaggcagcctgggctcccctggaaatcgggaaaacaaggagaagaaggtcttcatcagcctggtaggctcccgaggccttggctgcagcatttccagcggccccatccagaagcctggcatctttatcagccatgtgaaacctggctccctgtctgctgaggtgggattggagataggggaccagattgtcgaagtcaatggcgtcgacttctctaacctggatcacaaggaggctgtaaatgtgctgaagagtagccgcagcctgaccatctccattgtagctgcagctggccgggagctgttcatgacagaccgggagcggctggcagaggcgcggcagcgtgagctgcagcggcaggagcttctcatgcagaagcggctggcgatggagtccaacaagatcctccaggagcagcaggagatggagcggcaaaggagaaaagaaattgcccagaaggcagcagaggaaaatgagagataccggaaggagatggaacagattgtagaggaggaagagaagtttaagaagcaatgggaagaagactggggctcaaaggaacagctactcttgcctaaaaccatcactgctgaggtacacccagtaccccttcgcaagccaaagtcttttggatggttttatcgttacgatggcaaattcccaaccatccggaagaaaggaaaagataagaagaaagccaagtatggcagcctgcaggacttgagaaagaataagaaagaactggagtttgagcaaaagctttacaaagagaaagaggaaatgctggagaaggaaaagcagctaaagatcaaccggctggcccaggaggtgtctgagacagagcgggaagaccttgaagaatcggaaaagattcaatattgggtggagaggctctgtcaaacgcgcctcgagcagatttcctctgctgataatgagatttcagagatgaccacagggcccccgcctcccccgccttctgtgtctcccctggccccacccttgagacgcttcgcaggcggactgcacctgcacaccactgacctggacgacatccctttggacatgttctactatccccccaagactccctctgccttgcctgtgatgccccaccctccaccctccaacccaccccacaaggtcccggcgccccctgtccttcccttatctggccatgtgagcgcctcatcctctccatgggtgcagcgcactccaccccccattcccatccctcccccgccatccgttcccacccaagacctcactcccacccgcccactgccctcggcgctggaagaagcactgagcaaccatcccttccgcactggggacacaggcaatccagtggaggactgggaggcaaagaaccacagtgggaagcccactaactcccctgtccctgaacagagcttcccacccaccccaaagacattttgcccaagcccacagcctccacgaggccctggcgtgtccaccatctccaaacctgtcatggtccaccaggagcccaatttcatctacaggccagctgtgaaatctgaagttctgccacaggagatgttgaagaggatggtggtttatcagacagcattcagacaagatttccggaaatatgaggaaggctttgacccctactctatgttcaccccagagcagatcatggggaaggatgtccggctcctacgcatcaagaaggagggatccttagacctggccctggaaggcggtgtggactcccccattgggaaggtggtcgtttctgctgtgtatgagcggggagctgctgagcggcatggtggcattgtgaaaggggacgagatcatggcaatcaacggcaagattgtgacagactacaccctggctgaggctgaggctgccctgcagaaggcctggaatcagggcggggactggatcgaccttgtggttgccgtctgccccccaaaggagtatgacgatgagctagcttctcttccctcctccgtagctgaaagcccccaaccggtccgaaagctccttgaagaccgtgctgccgtgcacagacacgggttcctcctgcagctggagcccacggaccttcttctgaagtccaaaaggggaaaccaaattcaccgttaggaaacagtgagctccggccccacctcgtgaacacaaagcctcggatcagccttgagagaggccacactacacacaccagatggcatccttgggacctgaatctatcacccaggaatctcaaactccctttggccctgaaccagggccagataaggaacagctcgggccactcttctgaaggccaacgtggaggaaagggagcagccagccatttgggagaagatctcaaggatccagactctcattcctttcctctggcccagtgaatttggtctctcccagctctgggggactccttccttgaaccctaataagaccccactggagtctctctctctccatccctctcctctgccctctgctctaattgctgccaggattgtcactccaaaccttactctgagctcattaataaaatagatttattttccagctta

SEQ ID NO: 97 - DNA, 233047 bp, Homo sapiens
gggtggaagatgagcagaagcccctgttctcggaacgccggctgacaagcggggtgagcgcagccggggcggggacccagcctagcccactggagcagccgggggtggcccgttcccctttaagagcaactgctctaagccaggagccagagattcgagccggcctcgcccagccagccctctccagcgaggggacccacaagcggcgcctcggccctcccgacctttccgagccctctttgcgccctgggcgcacggggccctacacgcgccaagcatgctgagggtcttcatcctctatgccgagaacgtccacacacccgacaccgacatcagcgatgcctactgctccgcggtgtttgcaggtaggaggggccgaccaccctcgcccggggtcggggtggggtagaggaggggacgccgcggctctcaaccctggagagcacctagagctgagagacaggagactttctggccccgccagactgacgttgagtgttgcaacgacacaggtctgcagagggcgactcagagggaaactgaggctggaaggagagaggtgtctgaatggcgcttctcctggaagcttcagcccaggttggtactgaggtaggccaggaaggtgggaccagcatctctcctctcaccttttcgggatctctgaaaagaggtctttctgcgttgccggcggcgaagcgctgtactgcagggctctcctccttctcccctgaaggtctggtcccaggcctatttataacccagctctcttcccgccccgatctgcgcctggctgctttcctggccctttgctctctctcagaggctggcctggcaggctggcagccactggaggcgaaggcaccctacccttgctttgcgcacaggatgggggaaatttagcagctgggcacagctgtcacagcaccaacctttacagactttctctgcccccaacccctgcccccaacggaccagtgggtggagggagcgggggtcgtatctgctttctatcatcagagtgaggcctccttgagcagggaagccactcccttatcagattgggacctcctataggagggccttcatagagttatgacttgacttttcctccaggagctgagggctgggccctggctgctctccaggaacccttcaggaccaagccagagctaggatctacacagctgggtctttgggcttggaaccatactgggggagaagaactagggggaaagagtgtgaacctcccacccagcctgtgggttttcctctcagcctccactacctgccactccccttctccccagagatctgacttctaactacatcccagacttccagaaatcatagcattagttggtttctggccattcagcacagtttcacaagctcctggatacacctgttcacagacaccatctgcacatatgatcccaggcacatgcacaccctggagcgtgtgggacacctgtgatgttccaaggaataaaagctccgaaagcacaggcctgtgtccagctcagcatgagcaagggatcatgtcatgagtaccttctcttgggtatgagattcagggcttctggatttgttggaccagagcagagcttgaggaggagttgctgaatggtcctgaggcctggaaagcagtgtacaccaagagtggggaccaagggggtggctgtggcactccagctgtgctttttttcctaacgtgctgctttgatctgctctcaatcagtttcccacgtggcctccggaaatgagctttatccaggtgtttccagcagggaggacatgggagtctttcatgcttcctctccgcatcctcagctctgggcaggccaggtcagtggccctgttcagcagcctggctgagggctctgggctcctggtgcacaactccagggggcaccattcatactgtaaatagccccttggcggaggggagggaggacaggcactctgtgggtgaagcagcctcctcccacgccagcacctcttccccatttatagcccctgaacctgggggctggtgctccaaatgtacactcagctgcagcagcccctgctgtcaggggctttgtttctggcttccactcagcctgaaccagattttcttccaccttccctgaccacatgccccctctgcacccccatacactcaatacactaggcttctacctcatggtccctcacccaggctaggctcagacctctggttggagaaaggaaagaatgaataataaatggcaggcactttctaaccccagaagtgcaggaagtgctgctggtgtggcttttcttttgttatttcagccccaagggcctgtgtgtggagcagctccccccatcctgcatcctcccatttacacatccctggctgaatcctctccccacccccatctgctttttgcctgctgcctggctcttcggggtaggctccccctttccagggcccagagcacacagctcaccttggggaaaggaagtacattttctgtgccaatccgtcatgagcccctgagcctaggaagagactggctggagcccccacccctggtcatcactgaaaccgccaggcagtcctggggaatgcagtccctcccctcccccagcccctggccacatttcacgtcctgcattagccaagctcctaacccatgtccaaatttggcctccctgtgacattcaggcctgctcgctctccttctccctggcagggtcagcttggtgaatgattacacagaagacttcggtctcagggatgcagctcaaagcaaaacaccagtctgggaagccttccctccccagctgggctgggtctgctcttcccagactctatctgttgtcccataaagcccctcctttggttacatgattataataccctgtagccacacttcacagcccctttgtgcatgtatacattcattgcaagctcacagaagctttgtgaggtagagggcaaagatattatccccccttaaagataaggatattggcccagagaagtgaaggagcctggccaaggtcacatagtggccacagcatccccacccccaacccctcatcagtgccctctgttgttctcagtatccttggtgcatgaataagaaagtgctctggagagcataccatatgctgcccacacccagggcaccagggcactcggacctgagccagccagggagggtggtgcctggggtccccagcaagaagctgagtcagagtagggggagtgcagggctgcaggagcatggtgtgaaacaattgaccaaaagatggaggattctggggtttcaaatgcgtgttcctcacaaacagagggaatggacatttgctaagcacaaaagcataccattgtcaggtggtgtttcttgaaaatcccaccaacagtcctatgaaagagatctatttaactgacaccatgcttattttaaggcagatactgttctaactagaacattaatagaagctacatcatgacccggttataatttgtaccaggtccttatatgtagacatatacacctcagtcctcttagcaagcatatgtggtagcaactgtcatcactcccattctacagataaggaaactgaggcatgaagaggttaagtaagttgcctgaggttatacactggtaagtagtggggttatgatttgagtctaagtatctggctcctgagcccccacaatatccccagctttaaccactctgctatctacctctggctttagcttggatttaccaaagacaagcaagaaaaggtggaggggcaggacctgaacccaggcctggctgagaccctgatgcccccctcggtctgcaccttgactcctctcatcacgtgcgtggtccttactgctgcttgctcacccaagcacagacatcctcagcccttatgttctggtcttgcagatgctttcttatctcagggggtccttgctctctgcctcaccctctctatatctgataggaccaatcagtcaccagttgatgcaggacgctccctccaggcagtgctctcgttccgggcaagctcacagctctgacaggactatggtggctgcctagggtctgataagccaaggccagggcaatggtcacatggcactgaggtgggcaacctgtggtgcgtatggcaggtgctccgggacttccagggagggggtcatgtaactgtagatctcaagcttagccagtctaggagaaagtgaaagttgggcggggggctcagaagagcggctagctggcagcctgagtcacagtccagtgggataacagcatcgaacaagagggagagaaggactgcctgcatcttgaactcgggatcccaggtctgccacttttcaagctatgtggctttgggcaagttacttaaccactctgtgtcagtttccttatctgtaaagtgttgataacaatagcttgtacctgctttggatgaatcattctggagagtttatgtgttagtccatataaagcacttcaaacagccaggcaagcaataaatgttaactataataattattacatatacttttacataaatttattataatcattactattaacatatattgtacatgtactaagaaataattgtacacatccacaaaggctttcaatgtcttttttgcttggtgaattctatcctcagctttgtttctccatccactgtcctgccaggctggacacaacaggccaagtggtgggtggccgtctgtctgcccccagggacactgggcctgtcttctctggctgcccctcctagagcagtcccttctgaggcgaagtcatttggccacctgcctgatggctggcagtggccctcactggggtactttctctttctgggaacaagtattcctctggtgactcactagcagcccacaaacctcttcagtccctctccccaggccaaactcactttctttctctacttcctgcatgctagtctctttccagattggtccactagcatgggatgttagcagagagagcgttcacatctactgtggatgtgctgtgccccaagcactgtgctggagttgctagtgttttgtttaatcctcccaacaccgctgcaaactgtcctcattcttttgattgcacagaagtggaaacagacactgaaaggtccaatcacatgcctcaggtcacaccactaggaaagggtggcctgggacagaagcccaggactgtctgattgtttccactatgcacgatttctcccctgacaggccctaatcatggctgtggtcagaaccaggactgcatgtgggttctaccctcttgctggatacacaggtcccctgtcaattccacctggtggactgggatatccgccggacacatattcttaaatgaatgtgaagggagagggaagaaggcctcatctatacttccggaagcctttggacattgacaaatatgccctgaaggagtcctgtcaactcatgtagaatgttcctctaaaggtcagtgtcactgagcagagaggcaaggtttgtttgcctcctggcaccccatgtttaagtcttgggaaacacaaaggaccagctaacattaggagaatgtggccagaggagaactggcccaactccagcagcaagagatgattagaagcatgccttcctcgatggtcaggaaggtagggccacaaataagtagtgacaggggtcacaaactcatgcacttccagaaacgtggcaggtggactaagatcaagctggaggggaaatcctatgtgcatactgggagtgagctgagggggggacacctggtctacaggtgccagacggtcagtgttaggtggaaaatctaggcccaggtgccacattctctgatttttttcaagagaagctgtaaatccagatttatacggaaaagtcttctaatatttaaggtacaattttgttataaaacattgtactgattaaagacaacatgtctgtgggctggatgtgtcccagagaacaccagtgaccgcttctgagacacagtatttcattcaatcctggagaccttgggcctgggctctctggagggcagagagccagtgtcctctcccttgggctcatcaggcagcacctgtcatcagtgactacaggatggagtgagtgggagagctttagtccccttcccccttaacctctgtcagccccgaaacactgcaataagcatgaaactcagtttccaaacaggcccctcaagcccttccttccaggctatggctcctaagctggccccatcacctttacagtggggctggagtagcctggggtcccgaggagctgccctcacctgaagcctcaggtgggatgcagatctagctatttgtaaacaagccctaactaacattggtataagcatgatggtctctccactcacataatagttgaatgtagacagtcctgactggtaagactctgacccacaggctgtccaggaccccagctcctcctgttttattgctctgttatccccagaagttccctttgacaacgtggtccatgatggcgcacgcctctgtctatattccagccagaggggaaagggggccggggaggcgtgccgcttccctttaaggacatatccaggcagttatatacagcccttctgctcatattctgttggtcatcaattagtctcctggctacattcagctatgagggaggctgggaaatgtttttatttgggtgaccatgtacccaagtaaagtgctgtggaaaatttctgtggatgaaggggagaacatatactgggaggtggaggtcaggtctcagccacactctccattagaacttaattcctgataatgtcccctcgggaggaagccctattgagttactaggcctcagtatgaagtctgcaagggaacagtcagttatctgattagggagaagtccaggtcagtgaacatcagccagactaggaagttggaggctgggatgaaaaggaggcctcaggaagtgtccaggggtcagatcaccagcagttgcttttctgatttgcagaacagatgtggggagacccttttccttggatgcaagccaagggaaggcagaagtcccttggaatgttcctatggaggtattagttataccccctacagatttccatttcctgtggtgactctgaaggactggagctggggtagggtggggtatgataggggcaaaagcaaagccaggaatcattgtgatagacaggaaaaaaaaaaaaaaaagaaaaagaaaaagaaaaaaagctttgtaatatccaaaagtccctctagggggcagtactatcccctttgagaaccactggctgaactcaccagtgggcagaacccacacccgggagccacgtgcagtgtccactataccaatgccaggccagtcctgtactacacgctgggaatacctgggtcactaagacagacttggtctctcccctcgttgaccaactccacagtctagctagacacgaaacgggtgattacgctaatagttattcctgaccattgtgatgcgtgctaagaaggaaaagggctgctgtgcagtcatttgccagagggacccgtctagaccccaggatatcagggactgctttcctggagaggtgatctttaagctgaggcctgaagtatgaataggtggttctgcaaagaaagagaagaaggcagctggaggcagagagaacagcggacctcagagctgagagggagcttggcatattctagaaactgacgaggcaccggagctagagctaggagagcgagaggtggaatggccttgccctttggcccgaggaaatgaatctgggcttcatcccaagagcacaggaggcctttggataaacctcccaagaggcttttagcaggagattgacctgatcatatttaagatcacctggctgcagtgtggataatgggtcagacatagccagagtgatgatgtgatgaggcgactgaccagctaggaggcacctgcagtggcctgggcaggagagggtggtggtaagacttggtggagtcacttggatgctgtgggcacacagatggtaccaaagtcacaggggtcagtaaggatgatttaggctgcaagcaactgaaatcctggcttaaatagacttaaatgagcagagaggcaaggtttgtttgcctcctggacaccccatgtttaagccttgggaaaatcaatttattaaatgctaagtagtcttaaggggatcagctcacttaactggtgtccagagacccagtgagctctgggcatatagactatacaactctgtcacaggatcctaagggtgttgctttttccagctggaaacctctgtggctggtagcacctttgcctgaattttgcttgggcccactgggctccttctgcccactcagcctggcaggctgtgctcagctctcagtaccagccctgatcccacgcctgcgaagggcgagccaggcactgaacagcaaggggtgtgtgagtgagtgcagggtccagccactgcgcacagccaggcatgccagctgtggtggggcaggcagctccaggtgctggtacaggcactggctctgtgccaggctgcggctgggccaggcatactggaaggggcttccactgtggctactggggaatgtggtggtgcccagaagcttggaggcaccaggaactgcagagccccaaagagggtgtcacagccatgtcacccctaggtctgggctccccaaagtgctgaagctttatctcgttctcgttgcctgcaacatggcgagcagggttggggtggggggcaggctgtttcagccttgtttgtcttacagctctttcagtcctgctgttcagtgggtcctgggtccttgtcctatgtccaggaagaataggtacacagacaactggatggtgagcaaggtggagagagcttcactgagtgacagaacagctctcaggaaacccgaagtgggtagttcctttctgcaggcaggtcctcctgataagtgtctagctttcagcagagaggagacccacatagggtagctcgtcaccgcaggcaggtcttcccgacaagtggaggagacctgacctggagtgggtagttccttcctgtacctggtagtcccaacatctgtctgagtctagctgagtcctgggattttatgggctcagaagggaggaagtgtgtgctgtttggtccatgggtgaccaggagcaggctgggggaaaaagcaccataagttctcactctgggctgaggactccacctggaactggcagcccagcccccaggcttcaggccatccctggcttgtaggtggggtttcactgaggacccacccctttctgcccaggagcctgtctgcctcctgctgccatcaacatgtcgtctagggcacctaggctgttcatgcagaggggtgcttgcagttccaggtggagctacccctcagcttccctcctgagcttgtcagtgctcaaagtctggagggggttgaggcagcagggggctggcatctcagtgccaccacaagtgtgcacacatctggctgggttgcaacagcatgtgggcttggacacaactttgctccaccctggagtgggtgactggagttgggagaggccagagatggggcgaaggcacttctgagcctgcaagcttcctgggccccagagagtgcagggatgcctggatctggggccgcagccaaacggctgcagctgtgcctgggagcttggggctcccaccccaccaacttggtagggggcggggctcccacctgttcccagcccccaccggctctgcagagtgcacaacactggccagactctccactgcagcccacgtcttggcagtggccactccagatgggccgctgctgccagcaactccatagtatcatcctgtacccaggcaggctccatgtttctctctgatctgctgtccatgatgtctgctatgtcctcaactggtcagcaattggatctgcaagcttccttatgcacacaaagcaggagagggagttgggcttctctattcatggcatataaatctgtctttccaggggaacaacttaggacacatacctctagctagaccaatagccgttgccaagaaatatgctcagatagagtgggatccatcctggagctggggctgcataactgagcagtcaggttctgctagaagggaagggggtctggatggatgttgagggaatcaaatgtccgcctcatcttgaggggagaagagaagggtagagctgggaggaagcagcaagggtccaagcagctagagaaggcgttgtgatgagaacaggctcagactctcctctctttccttttccccacccccatgctcatcctagctctgtcctttaccgaccttccacttcttgggagctgtagatgtggttgccaccctctgtggtctctaccccttgactggaagctccctgagggcagggatgtgacttattcccagcaagtcagaggtgatgggtgaatgtttattctttcagtccatcatttagaaagaatttatggagaccatgctttgcaccaggtgctgtttcaggcactgaggaaacagcagtggacaaaacagacaaaaacccctggctccttggagcagacattctgatggggaagacagaaaacaattaagacacatgtgctatacagtgattggtgctagagaagaagcctgaaagggagatgaaagagggaaagttgtggtgttcagttgtgtggccgggttggtctcactggagttgatatctgaaggaaaggaagacatgccagccagagggaacagctgacagagaccctggggaggcgctggtctggcctgtctggggaacagctggaaggctagcatgggtcctggggaggtcagagaggtcagccagggctttcaaggtcacgtaaggggagagtggctggagaggaggtcagcgaggtcagccagggctttcaaggtcacgtaaggcctttgagttttgcactgagtgagatgggagccaacggaagactttgagtagaaccaggtcatgagaattgaattgaggatagaccatggggacaagggcagagcaggagacgcattgggagtccatggagtcgattaaatgactcaggcaagggatgacaggcttccactgggggcagttacaatggagatggtgagatatggtgggattttggacatattttgaaggagagtgggagggggatttgcagttttggtgacctggtggggttgaaggtgtcactgggtgggttcaagagagaatggaggagggagattggagacagaaagtatggagagctccttcaaagggcattgttgtgaaaagggagaaatgaccagtagctgaaggggatgtggggtcaacggtgtgctttcttgagagcaataacatcatgcttgtgtgccgatgggatgatccggtaaacaggggaacttggtaaggcaagagagtgagagaatcactgcaggctcaccactgaatgggcgagaggggatggggtctatgcccaagtgtccagttgttaccagtggggagtacgggtgattcatttgtaggaacaggagagaactcacaggatttgggcacagatgccgagggcgggcgttagaaggagactggggacctgaagaagttctctgctccgtaaagaggaagcaaactgagagtgaggttgggcgatggggtgtcctaggggcatccgggagacagggagacaagacatatagtatgattgcccccagcagtgagggctcgcttgagttaagggtcatgactacaaaaggcaccactcaggccggctgtgttactctccaacacagcactggttgggggcaggtgtggaggaggcggagttggattcgccagggttatggcttagccctgtgagaatgctgtatccctcaaaataagagaggggaaagggagttgagattttgcgcagcagtgcgtttaggctgagtgagcaggttggttagtgaggacttgggcggtgggaagacggacagtgccctgacaggggctaggtgctggagtgctgggggatagaagtgcgaagccagggcccctgtgtcaagaagttcatacgctggaaaggaaccagacataataagcgaaacgactgtcaccgttcatggcttacaccttgaacagctttccactgtggagactagggagtgtagagattgttggggatgggggacttgcaggggacagaatgggccgcagctggaccctagttctccagggaacgcagtatgatttgaatacagatctctgcctccagagatgagtgactcgacaccgctgcggagaaggctccgaggagggttggtggggactcgaacctcggagtctctcccgacccgggggtcccagcaaaccagaacggccacctagacagcctgcggacgggagaggaccggctccctggcgcagatcatggggcaggtggagagaggcgagaggcaatgaggcggggggctcggggtgcacggcacgctccgcacactcccccttcagcgctcactcagacttggtttccccgaagacacactctcgtccccgccgctgattgcccactccttccgcctgcactcctgcctccttctcaccctttcgtcgagcgcacagggcggctgccaagtcggcaccggtgcgcaccgggcccgggatccctggctggtgtggagccttggtcaccggaggcccccgcggagcaggccccacggcgccttgtgcgctctcggaggccgagctgcgcgcccgcgtcagcggcgcctcgttcctggccgggagctgggacccgcggagctagggaccagcacccccacaggcgcccgtctgacccctgtccctccccgcccgccgcgggcagggcggatctgggtaggggccggagggggagggtccgcccagcgggtgtccggtgtcctccctgcagcctctcccaggcattggtcacttctccgcggaggagcagcgaaggcgacagctctcttggcgcggctgcctgggagccgggcgcttgctgggtgggtgctcgggcccggtgctcccgctcccgccctgactgcgcgcctgtgtgccgccggggctgcccagccatgctgtgctgcctgctggtgagggccagcaacctccccagtgcgaagaaggaccggcgcagcgaccctgtcgcaagcctgactttccgaggtgagagccccgtggctgccgcgcccatgctcgggtgctacccgactctcggcgctcactggcgggtctgaagcccctgctccggagctaaccctagtccaggccacagtttctccctttgtcagcagggacggaaatcccagccccgacttctgcaggggggcgatgaggaataagcagagcacaataaatgccacagggctttgaaaaattggaaaagcgaaagtgccgtaggtcagcggttatcacttttctaagactgacacccagaggaaataaagtccgagcttttactgggtagtggggataagggtaagttggaagatgggtgcagaaggtagagaggaatcagggcctctgaaaaacggggcgtgtagatgatgtgctttgaaagttgtgtcttttttcattcattcattcattcattcacccatctttatccaacattggctgtattgaatctgccccgtcttaatcagtaggaaaaggaacagaataggatggaaatggccttgacacaaggagttttgaggaatgtcaaggatattttctctaaattcaagaagctaagtccctacatgtagtgcttagaatacatacaggtatttctgtgtggggcagcagagaaatcacacacacactcctcttctcaccaggcgtcctgaaccccctcccccaacccctccaaggcagattcccactggagcgggtgtctcaggaggggaaagggaagaggaaggatctgtcaaaattaagagaaggaacaatagctgtgagtcaggaccccagttctgcagagaaagataaatcaggagaggaaagagggtttccacttagccaggagccataccctgtagctttgtggaatcgataataataataataaaaatctacgtatcagaaaagatagtcaaatgaagaaggaagagtagctggtgttttcataagcctccttcagtgcaggcaccaagggaactcttttcagtctgacccatgatctgaatcatatctccaagcacccccaagataatgatagatgaaagacatgatttggcaaagggagatttatgtgtagcttttattctttgctgtgggacaagttatatgtattcctcttttgaaagatgtgatttgaaacgtttaagaaaatttcactattttcattgattggtgacatgcctgggagttcactatgcaagagcaacttcaagacaaagtctttccttctccagtgtccacctgatgctgcctaaggctttgctatgcagaaattgcggtgtcaccattggctggaaaagaaattccctaaggacactgggcagggcacacattagcatagggctctggatgctctaacactcgtttgggtctgctcacagctctttcccttgtcctgtaacagtcctgtggtggctaccaatgtctccattctgcaaataaggaaattgaaacccagggaagttaaatgtgttcaggtcagtggtcatggcagggagctaccagcgcttggagtgggtattgcccttgagtcgggaagatgaccaaatcccttgaggcccctctttactattgccctcgcccaagtaccccgaacacgtgcagctgctatctccccccagatctctgtattccttctttgtaatgccttactatttatttgcactgatgatctcctcggaaaacagaaataccatacaatagaatgtaacatctccaaccgtttcaagtctatttgtatttcaaagcccagggcaatgccaccttctccaggaggacaccctggatccccctggctctcaagagtctctcctctctggatgacaagcagcagcaccttgctagggatgctagcaccctcgccctgactggcctgtgctcagctccatgcttaggtgccttgagagcagtgacctgtcctatttgttcattggtttgtcccagtgctgagcacaagtaggtgctctctagtgtttgtgcgctttctggcccagcctctagccatcctccaggtgtgcctgggagcttcatttagtctgggacatggtccgctcacttgattgttcctgagaatcacttgtagaacgtgtttgagaaacagattccagagtccccatctgtagaggttccgatgcagcaggtctggaaggtgacctaagaatcagcacttaacaaatacccgatgcaggttattttggaaccgcatcttgggaaaaatgggtctgagatgtgatggcaggtgaaattaatgcgctccccattgcgggagcattcactggggagtttggggctgagttgatgcctaaggagggaaaccgttagaaccaggttcagaacttacagagcatgtaggctggggggactcaactctggctgcaggtcaacattgtgtgtgggagcttcaccaaagaccactgccaacctccctgcctgccttttctgaagccagatcccttccggtggggccccaggcataggtgttgtttctgtcaaatttccaggtgttttgaatgtgcagtcagggttgagaaccactgagcccagctcctcatggcacagatgggacagtggcctgcttgcagagaagccagcctgcactgtgtgtttggctcctacaggcagcctgaaatgtatggggctgggctggccccactttccttgcagttgttccctgtctcggatgtaatttcaggacctgcctcccaaaatagactatgagctctgggaggctggactctgagggcaattttttggcttccctgtctaagcacctctattaatagtagaggctactaatgaatacttctcattcttttgtttttctattaattaattcattaactaaaactaccatgagtaactgggccatagtagatatttttgactgattgtgtcaacgagcagcttaatttcctatagcatttaattgtctgtacttcttttctgccctgcccattttccattccttaatgtgattatttatatccctctattcatgcagttagttcattgaacaaatatttactgagtacctactacgtgcctggtgcttttctaggtgcttggatgcatacaagaacaaaaccagatccctactgctttaaagctgaaacatcttatttccttgaaggccagatctgctgcgtccccacttggtgaatttctgccctgtgtcatcagccaggaacccagaagtcattactgacacttccctctctctcatcctgtcagggcgtctcctcctccagcctccccctcccacctcttctcttcttgatctcctgggggtctctagatttggggcaggagttgggggatcttatagaactagttggaggtggattcctgtcgtcagggaacactcttaactcacctatgtagggaaagtgggctgaaggccccggactctctgaacctagctgtttacatattacaaatgacttaaaatattgaaaacagcggccaggcgtggtggctcacgcctgtaatcccagcaatttgggaggccaaggcgggtggatcatgaggtcaggagatcgagacaatcctggctaacatggtgaaaccctgtctctactaaaaatacaaaaaaaattagccgggtgtggtggtgggtgcctgtagtcccagctactcgggaggctgaggcaggagaatggcatgaacccaggagacggaggttgcagtgagccaagattgagccactgcactccagcctgggtgacagagtgagactccatctcaaaaaaaaaaaaaaaaaaaagaaaagagctttctcttctcttccttctttccttccttccttctttccttccttccttccttccttccttccttccttccttccttccttcattccttccttcttttttttttttgaaatggactttcactcttattacccaggctggagtgcaatggcacgttgtcggctcattgcaaccgccgcctcccaggttcgagtgattctcctgcctcagcctcccgagtagctgggattacaggcacctgcaaccatgcctggctaatttttatttttatttttagtagagatggggtttcaccatgttgcccaggctggtctcaaactcctgacatcagtcaatccacccaccttggcctcccaaagtgcttggattacaggtgtcagccaccccgcctagcctgttttctttttataaacataatatgtacttgctgttaaaaatgacaaactacagaaaggccatgaggcaagagtaaaaaatagccccaaatcctgccactttgaattaacttgttaacaatttgacacatttcctccaagattttttttcttaaaaattttagttataaaatttaacatacaaggaaagtgcagaagatataaatatatgatttaatacagtagttctcaactgggggcagttttttcctcagatgacatttgccaatgtctggagacattttgggttgttgccacaggggttgggggcacagggtgtttatctacagggtagaggctgaggatgctgctagacattccacagtgcaaggggaggtcccccacaccaaccacagagtgattcagcccacatagtaatcatgccacggttgagaataaatatgtgtgtgaagagaataactatgtaatatcacccaggtcaaacaggtcaagaaatagcacctggccagccccatttctccaccagaagtaatcccatcatagattttttttttcccaaatgtttgcacatttgctgaaaaataaaccagggggccgggtgtggtggctcacgcctgtaatcccagcactttgggaggctgaggtgggcggattgcttgaggccaggagttccaggccagccaacagggtgaaaccctgtctctactgaaaaatacaaaaattagccaggcatggtggtgtgtgcctgtaatcccagctacttgaggggcagaggcacaagaatcgcttgaacccaggaggtggaggctgcagtgagccgagatctcaccactgctctccagcctggatgacagaatgagactcagtctcaaaaacatcaattaattaattaaaaaaaaatccagggtcattttttatgtcagtaagtattcttctataacacctttataaatatctgcgtaatattttcttatatggatgcaccatcattaatttactcaaccccctactgatgaatatttaggttatataagtgtttatatttatatccagtgcttaaattatacagtcactgtgaggcatattctggtgactacatctttggccacatatttaattatttcctttgggtaaataccagaagatgaattgctatgtcagaggttatagacagatttaatgcgttgctgcatttcccaaattgttcttgaagtctgtatcaactttatcctcctgtcagccaagtatgagggcttatttttctaataatcctgctaacacacagcattgtcctgtaaatctttgacactttctttcttttttttctttttgacagagtctcattctgtcgcccaggctggagtggagtggcgcgatctcggctcactgcaagctctgcctcccgggttcacgccattctcctgcctcagcctcccaagtagctgggactacaggcgtccaccaccacgccaggctaattttttgtatttttagtagagacggggtttcaccatgttagccaggatggtctggatctcctgacttcgtgatccacccgccttggcctcccaaagtgctgggattacaggcgtgagccaccgcgccaagccaacactttcttaaggttcaaatagtatttgtgatacttcattgttatcacctattcgtatttattcttactgaattactttttcatttgcccatggtggagcatgtttgtctttttcttcattagttgcaagtgctctttatgtattgagaatgttaccgtttttgtcatagatgtttctagtatcttctccagttctgtttgtttttctttaattggcaagtaaaaattatatgtaaatatcttccccagttctaatgtaaatatcttccccaggccttctgagtttaaagactactcttcttgaagtgcatttcaccctggctccctccctttttggccacttctgtggttccagctaggatttaggaaggtggggtggagggtggttgacggggagaggagcagtgctctgctgatgataggggagacagctgcccagttcttggggtgtccaggcctgagaacaccatggcagggcaggtgtcagaatgaccatctacctctgctttttgtttgggggtgtctgtaccaagaggtaatacaggccttccttcagcccacgctagggccatcttttctcctttcacttgctgctgcctttgggttttctgctgattctttgaatttctgtcactttcttggtcttatgtgtattctaatggggccgtcaagaaacgccctgcacaaagtaagccctcaataaatatctgggggataagcaagagtctgcatctaggctgctgcaggatccaaagccccctgcagcttctgagagtaactcctgttgcctgactcatgggcagatgcagctgtctctctgtctctctcactgggagtctgagacaccgcaactcctctccttctctctgtcccctctctaggagggacatccgagactgggagacatcttctgctcctcctgcttcccattcgccaagccgatactggccagtagacctcaggcccaccacctgtgtccattccatttcccacctggacttaaaaaaaattgtggtaaaatgcacataacatgaaatgtaccatcttagccatttttaagtatacagttctgtggcattaatcattgtgcagttatcaccatctccagaacttgtcatcctccccagctgaaactctatacccattgaacactaactccctattcccctccctcaccgcccctggtaattgcagttctactttctgtatgatttttttttttttttttttttttttgagacagagcttttctcttgttgcccaggctggagagcaatggtgtgatcttggctcaccacaacctctgcctcccgggttcgagtgattctcttccctcagcctcccgagtagctgggattacaggcatgtgccaccacgcctggctaattttgtatttttagtagagacagggtttctccatgttggtcaggctggtctggaactcctgacctcaggtgatccacccgcatccacctcccaaagtgctgggattacaggcgtgagcaaccatgcccagccgattttgactaccctaggtacctcatataaatggaatcacacactatttgtctttttgtaactggctgagtcactcagtctagaggaaccctcagggtttcatcatgaatcttacacctgttgctggtccccagttcctcagagcagtttgggaagagggcatggccccctttcctcacccagcataagctgtgagctctcctgtatcttcaacttctgttaaattacatgcataaagccacatctctcaaggcctaaattaataatcaggaacagggcaggccaaaatccatgatgaggaactattttcttaacagtttcctaattatcaatgtgccttcccttttcttggtgcctgtaaatcacgtgattgtgcttagtgaatgtttcgtttctttctttctcctctttggggctgcagcacccatgagtgaccccttccttcatgttacccagagggtcccagagttggcccttctaaccaggacttagtgaaatctcattgagagcttttattctcctcatctacagggaaggtaggaagtggaaaatgattaaaagatatttagcacagggcttggcacacagatatcgctcagttaaggaagcctggagcaccaggaaatgagtttccaagtgtgcaactcatgagaggctgcagatggaattttccatgttactcctgtaggtcacaggaagctgatctgtgataggggaggggaagtggacacgtagcttgcatctcaggccccctcagaaccctgtgcagcagacacttttattatgatccactgattgctgaggagcaaggcctagaggttatgagtcctccctaaggtcacatagtagtggctgttagttgagtgactccaaagcggtgtgtctgactcctgctggagccacaccaatatgggccacacagaattcaaagtggttcagccaggacccttcccccacatggcgcctcctttcttcctccctccgctgacaaacagccacaccatgaatgaagtcttggggcgttccctggaaacagcgcttctatcctcttgtgaggaagtcaacttgcagtcaacgtggaaagaaaaggacccattcattcagcacccgattactggccacctcgctatagactagggttacagttagtaatgtgagtaaggcatggtgtttgccgccagaaactcccagcccagttgggggttcagagctagaagcacactgctacacggctgtcctgcacatgtggtcacagcatggttagggagcaccaaagagagatcagctacctcttttgggagagtcaggggagtcttaccagaggagagacaaccgtgctgggtattgaagagtcagtaggagttcactagatccatcagagtgggcacagaggggagggcaggggaaggaaactcacatgtaatcagcatactatgtgccaggcacctcaacgttctatctcggtaattttcacagcaaccccttgtaaggtagatattatgatgatgaaattgaggcagaaatgttaaatgaatttcctaagagattattttattttttagagacagggtcttgctctgttgcccaggctggagtgcagtggtacgaccacagctcactgcagcctcaaactcctgggctcaagcaaccctcccacctcagcatctcgagtagctgggaccgcaggcacatgcaccactacacctggctaattttgtaaattttttgtagagatggagccccactatattgcccaggttagtcttgaactcctgtcctcaggcgatcctcccacctcagcctcccaaactgctgggattacaagtgtgaggacctcactggcccctaagaagttcttaaagtgttgtacatggaacttggggggatcctcaagactctttgagcaggtcagaaggtcaaaactccttcacaacaacactaagaggctatctgccttttttactgtttggacatttgtactgatggtacaacagcaatggcagctaatactactggcacctgatcactaatcgaggccttggcaggctgggtgtggtggctcacacctgtaatcccagcattttggaaggccgaggtgggcagaccacctgaggtcaggaatttgaggccagcctggccaacatggtcaggctaaaaatacaaaaattagccaagctaggtggtaggcacttgtagtcgcggctactcgggaggctgaggcatgagaatcgcttgaacctgggaggcaggggttgcagtgagccgagatcacaccatcacactccagcctgaatgactggagtgagactccatctcaagaaaaaaaaaaaaaggccttggcactaaattgtgcttcttgttgtgttttttagattgcatgcactcacagttaaaaataaaaaggcagtttcatttaagagtgtccttgatgaagcagtaaaaggattagtttgaatcctcctgtacatgtgttgagaatgttctgtgtgatgaaatgggaagtatgcatagtgcacctctgctgcacatcacaaaatgatgattgtctccaggaaaagcactggagtcactgcttaagtgacaaaccgaactagctgctttttttttttttttccatggaatactgtttttactttaaagaatgactgacaaaactatagttatttgacctgggcattgggcagatattttcttaaaaatgaaagagtgagcctgccatttcaaggaaaatggcttgaaataccacttgctgccaatcaaaaaatttgagcttttcaagcagaaattggagttttagaaaactttgagaagtaacttccagcttcccagtactgaaagtgttactcccccaaaactctgggatttgttcacatggtgaataacaaacgacgttccatgagaatgcaggttttgatcaataggaattttattacttgtcacaagcaggagcactgggacaaagcagtgtctccctgagggaaagtgacaggagggttttatggggcaatggagaggggagagggtgcaacatcgcatgtagaggagggttcccggtggcacagatgctgtgagtcatggtgccagcacataggttgcatgttatggtaatgaagctacaggtctcctggggtgcaggctttagcatggtcatgaggaaagttcattggggttcatctgtaagttgccgggctctgtcaggagctggttttagcccactagatgaccgcctactacacagagcttgaaaaaaacaggctgtaagacagaaagctgtaaagcaggcagattgctcaatctccctacctgcttacagaaggctgatggtgacattaatgtatgagtgtaattttttggtagggcattgtgaaatgtgtcaacatctgggaagatctacgtaactgactgaacaaaaattttccaaatgaccaatgcaactgttacagaatcatacgtgggtgaaagattcattcaaactgcaagatagaacaatgaattttaatgtagcagagtacaaaatgttcattgatctggtttcagatttcacattgcaacttactgttaagaagttaagaactactacttgttgagttttgatgtagtatcaaagaaggatattcacagttatctgaaagtgtattaaaataggcctccctttccaactacatatctggttggattttcttcatagacatcaatcaaaatgaggagtctcagcagtttgaatgctgaggtattaatagatatgagaatccagccaagcattaaagagatttgcaaaaatctaaaagtgtcacttttccttttttgggaagttatagtttttttttttttttgctatatatgtgtcacttatgttaatatttattgggcttattgtgattttaaaattactaaataattatttttaaatgcttcagttataatttctaatgtaaaaattcatagatgcaggccacctaaataaaagctctttggcatcctcaataatttttttttttttttttgaggcagagtctcactctgtcgcccaggctggagtgcagtggtgccatctcggctcactgcaagccccgcctcctgggttcacgccattctcctgcctcagcctcccgagcagctgggactacaggtgccagccaccatgcccggctaattttttgtatttttagtagagatggggtttcaccgtgttagccaggatggtctcaatctcctggtctcgtgatccacccacctcagcctcccagagtgctgggattacaggtgtgagccaccgcgcccggcccaggcatcctcaataatttttaagagtgacatcctgtgaccaaaaagtttgaactgctgccccaaagaatcacaggaaataagtgttttatagtggcctgtgatttcaaatttcatgattttttccatgatcagtgattcacagtgggagagggagtttgggagctcccccctctccctggagggaggtttatcggaatctctgcgggactcactacaacgagcaaatatttacaagataattcccttagaatctccctgagcccctccctgcctccctccctccctcagatggtcttttgctccctctcacgtgctctctttctctttttttctctctcctcttcttcaaatcctccctcaccccttgcctgcctccttgatccctctctgcttccctcctcctcttctccaggctctgaacctggcagggcggggccgaccccacaggaggctgcacctctccaggctggatggactctgatgtgcttggctctaaagcctactggggctcctgggagatgtggccagaggctcgagggactttcgtggtccaggcaggactctctgaaagctgagccatccaggtggagaccaaaggctttccactgagtcttgcacaggttgggtggaatgaggtgatctttaagagccgacccaaataaaagttctgtgtcaggctgaaccctttgaattgtctgttgagcgccccatcgtttcttttcctgatgcttactggaagtgcccagggcactgcagaacaaagcttcattaaatgccttctcttcttctttgggaccttcaacactctttttctgtggatcagtgtcttcatggaagacgtgtctccagacctactgggcttagtgggggaacccctcaccctgacctgtcggtccacatggtgggccgccaagcagagagggccaaagctctgtccaaactccttgttttgtggatcatccagagagagaaatgcacttgccagcccagtaaaggaccaggggctgcagcacctgcctgtttctcccagcctacggctcttccatggaaatgaccttcctgcccactgctgtagaacctaccctaggaggagggtctccttgtgcgtctcctttgccacctttctttcaagcctcacctgcccacctcactggggacaggcacttgccccttcatgcccactgctccagaggaagggcttctgccgtgcatcgtctggggcacagtgggtcagctctcagccatcaaagtgttagttcttcttgtccacctcagagccattctgcattccctcagccagccctcccagccacatagagcttccttgggacagcttgcctcagatggactccttcaaggccttggagggtgaagtggattttgtttaaatggaaataaaattaacatatcataaaattcaccatttgaacaatttccacatatataatttaattggttttaggttgcaatattgtgcaaccatcatcatgatctaattccagaacatttttgtcacctcaagaagaaaccctatacccattaatcaatcacgtccccatttctattttccctttcccttctcttagcccctggaaacaactaatctgctttctgtctctacagatttgcctattctggacatttcttatagatggaatcatataatttctggagatggatgttgttcaaaagaggaatgaaatactttctagggagattgttcattgttagaattagaaggctggatgtggtggctcacatttgtaatcccagcactttgggaggccaaggtgggaggatcgcttgaggccaggagttccagacccgtctgggcaatatagtgaggcccccgtctacacacacacacacacgcacacacacacacatacacaccagcttgatctagtggtgtgtgcctgtggtcccagctactcaagagcctgaggtgagaggatagcttgatcccaggagtttgaggctgcagtgagctatgatctcaccatcgcactccagcctgggcaacagagtgagatgctgtctctaaaaaaaataatactacaatcagaaaatttataattaaaaaaattatttaaaaagtcagaaataacaataacaaactcattaaggagagtcagcctgggtactttcttttgaaagcatgtttctgatgtcccagagctgagagggggaagttgtgtgattggcattggggattcattgcagactggcgggttctcagggaatctgttgattttgtaagatttcccttggcgaccaagctgaagcacaggtctcagaagctgagcctaactcagcggaaggtgaaaggcgggatgtgtctctccattctcccttttgtgtctcttgtaggggtgaagaagagaaccaaagtcatcaagaacagcgtgaaccctgtatggaatgaggtatgtgagtttttctccttccttttctctctgtctgctgcagttgtgtctgcagggacaagttagggggcttgtggaggaggtgccttctcagcagtgtccttgaggtggggaggggctggtggtccagcctgccaacgaaatccttcttgctctaggaacctgggaggagggttggtggcctggcctactaggtaaatggaggggagctagatattttttgtttctgtttccccccagctctggccagccaggtaaagggtgctcagggactctcttgcctgcctgtttctctcacacaggctgttcctttttccttgctcaaagctcaccttctccccacagccctccctgatgaggcaggtcctcctctggctcctgctagcccctgtcccctcaaccagctccctgcatacatggctcccgggtggtcctttggaagccctgctgccttgcatggatggggtcggatgcacaggggagcctttgctctgaggagggtcatgggggcctagccaacatggcactaactcgtgctgcctaccagggcctggcgtctggatgagcccaataatcttggtccttgaggatgcttcagggtcacctggctttttcccagccacactcctggcttggcttcctggggatgggttgaaactgagttgggagaggggcctgtgaaagacctctctcctctcttctgctgtcttcagctcatactgtcacctctgaatttctggatctgtggtcttcatctatccatccatccatccatccatccatccatccatgcttccatccatccattgatccatctgcctatccactagaatcattcatgaatgcctactcagtgccctggtggcacgaaggtgaaccagacacagtctcttctcctagagggccataggttaagatgccttttctctttttcttccagggatttgaatgggacctcaagggcatccccctggaccagggctctgagcttcatgtggtggtcaaagaccatgagacgatggggaggaacaggtaaggtggccagaggggggtgctccatggcttgaaggtgcaggtaggattgtggagtatacagactgcagaatcccaggccccagggagctggggtttcaattagcatttatccacctcctcccatgggactggcccagtgatagatgttgggagaatctggctgtggcttcaggaactcagccatgggtacagctgagcttccaggctacaggggagggaagatgggctggaatcaggtgtccacgcatttgcacagacagtgtgtgccccagggagcaggaagactcgcttcctgctgctccagcccagaggctccctgaggtgggctctctttcccggcccagcccaggccagtgagggcagaggccccctgcaggaggcaggcaggcaggcaaagtgaaactgtagctagcagggagctttccaggaatgcttcatggaaggggtaggactagaggttaagattcgtggtttagaaatcagaacagtaaaaatgagtagcccggcctgggcgcttccctgtgttggggtttctgctgagtttttcatgtacctagtggtgggtttcttggtggggggatcaaagttgtggtggcaaaagcaggctccccctaggcaggcgatgaatcccttctcttgccattgagcccctgggccttgtaaacggaggtggtggggtggacaagttcaacccaacctgcagatgggtgggtcttggactggggctgtgggtggactgggagacatagcacatgaaactgctcatgatgagccttaagcatcagagtgggagtccggttgtccctgctgggcatgagaggaggcagctgcgttagatgccagcaggagtgggttcgtgcttcaagtgccatttacggaggtctaggcccaagcatcagggatgggcttgctgttttgtgacctgctcacaggggagcctttgtttgggaactgggtcagtggtgtctgaggcctgaaagcctggctgtgttgccctggggtggggcagaaggggttggggaggatgagaattcaggaacctagggaagggcaatcagggtctccggctgcaaaacacctggaaaatttgaaatgttaaaaactcagaaaaaaacccaattgccaccttctctctgtggctgtgctggccatgggtgcatggtgtggggagggtggggcactttcactgggcccccaaaagtgtggctgcaaggtgtggggcccaggcctgtgggccagggcatcttgggcccgtctcttccagctgttgacctcagacatctccacctgcacgggggacagggattggaatcatttcagctaccttccaacgcagacactgtggaaggcaaggcagccgctaacaagcatgaatggtggacccgcagatcagggagggagcagccctggacagtgggcagtcctcgaaggcttcctggaggagggtcactcagactgacttgaaggcaggggtaggctttgaaaaggccagaaggggagggtattccagcgtgtggatgtggcgggcagccaggctcaggtctcacaggtgggactcagtctcacgacacgtgcggccctgtgagaagtgggtggtggggaagaattgagaggggggtctccaatgccaggctgaggagaatagcagcaaagtcacacaactgccacacagctgagtgtctggccgcatgctgtcttatatacaagaccttttcccatcagttaggcacgactattgtaactgtcaccgttacagatggggaaactgaggctctgagagattgggcaactttcttgaaggctagtgatggcagagctgtgattggaaggcaggtttttgggacatgctcatagtcactgagccccatgtgcctctcggaggctcctggaagccccaggatggtgttggtctcttctggagagttcagttccctctgacaatgccggcgttgacagagtttagaggggcagaggcaggacagtctggttactgcaggtcatgcagcagaagcacatgtttcattttcattatcttattcagcatttttacaggctctgtggggagatttccctttttttttttttttttttttttttgagacgaagtcttgctctgtggcccaggctggagtgcagtggtgcgatctctgctcactgcaacctccacctcccaggttcaagcgattctcctgcctcagcctccctactagctgggattacaggtgcccaccaccacacctggctaatttttgtatttttagtagagacagggttcctccatgttggccagagcagtcttgaactcctgacctcaggtgatcctcctggctcagcctctcaaagtgctgagattacaggcatgagccaccatgcctggccagagatttcctttaaaaatttttaaaatcattatgggtagataatagttgtatatatctatggggtgcacgtgatgttctgacacaggcataatgtataacaatcaagtcagagtaactggagtatccatcaccacagacatttatcatttcttgtgttagcaacatttcaattctactcttttagttgttttaaaatatacaatagattattgttggctgtagtcaccctattgtgctagggaatactagactcattcattccatctaactgtgtttttgtatccattgaccaccttgctttatccacctctccctgctacccttccctgcctctggattctactctatctccggaagttcaattttttaaaaattagttctctgtagggagatttctaagaccacagaggcaaaatgagagctgtgaacatatttttggccaattcaaggaccaggctagccctcagggtaacggtaagtgagggccacacgcaggctgttctggctctgtggagcagaggtcatatggggaacgggaagcttcgaaccttggggtcctcccattggcccctgtgggtgttctctagctcctgggggcagctagctccctaaaaaccagtgccccatgtgagcagttcactgcagggctgtgtgccagaaatcaggtcctcaaagatcagtttatgggacagccaattcaccaacctcacccgtttaccagaaacacctttcttataacatttaaatgtaatttttgatttttccaaacatttatctcagtttcagatttctagcaattaaaacttgtcttaattaaactagattgaaatgtgcacgtacattcataaatacttgaggactctcagaatatgccaaagcaacactgtcatgagaagaaatgatagaattttggctccatggctgggcattgtggctcatacctgtaatcccagcactttgggaggccgagggcagcagatcacatgaggtcaggagttcgagaccagcctggccaagatggtgaaaccccgtcactactcaaaatacaaaaattcgctgggcgtggtggcgggcacctgtaatcccagctactcaggaggctgagacaggagaatcgcttgaacccgggaagcagaggttgcagtgagccaagatcactggctttgtgccaggagaacatgggatgtgtggcctcctcagctgttttcaggcaggtgcgatgcctcaggggagggagcacaggtacctgcaaggtaattctgtcaccccaccccatgaccagatggcaaagtacttccaccctacacatggatgtgagaaaacaaccaaagacaagcagcaatacaaattccaaaagtgtaaaaagaaaaccataccagggagtaacaagaatgaacgcatgacattttaaattttgaaagaaaaggaaaaaacttcagggaatccagttcaatgagcattttatgtatttatttttgagatggagtcttgctctgttgcccaggctgcagtgcagtggtacgttcttggctcactgcaacctccgcctcctgggttcaagtgattctcccatctcggcctcccaaaatgctgggattacaagcgtgagccaccgcgcccagcccttcaatgagcattttaaattgaagacctcctcactgccctccagtcctgcctgttgggtcaggaagcaaacagggactcaagggttaggtggctgtgccttgcaactgtcctcaggcctctccagttggtgggttccagtgagggtccccggagtcatcatgcagccacccgttttgtttgtgggaatcctgggcgtgtcttctgtgagctcccccgctgtccaacctcatcctcttccaagtgaggggatcacagccctctgcatctgttaaccctctcagtccccctccaccttgcctcccctccctcttccccacctccaccctctggctctctctgcttctagatttcccctcaggcctccctcattctttacagcctgtcactctgtctctgtgtctcctgctttgcttcttttccttcctgtgcccctccttttattctttctctcctccttctcttgcccctcctcgatcctcaccatcctcaccgccactgtcctctctttcctatggctcctggggcatttggcatttctgggttttccctgatgatcactggcagtttagggtgatcttgttaaaccagagtggtctgctggcccagagtgggatctggggaatcctttcatgcctcaggaaggaaatctccatctgggaactgtctctgggctgctcagcatgccattaacccatgagaggggcagccctaagcccgaggacccctgagccaacttcagggatggatcgactttatctggctaaaatcaggtttccaatgcacataaaaggaagctccactccttagggtggaagacactcaggcaaacctagcgggtggtcctgggatcctgttccaggctgcactggacaatttcctgtttactcgaggcttctcagagagaagctgaaggggagatgatccaggtccctgaccagctgttttgacccgtgggatgttcagcccagaagttcccaattcaggccacacaatagaatcacctgggcagcttttacacccactcatgcctgagccttggctgaggttctgatttcgttggtttggggcaaggtctgtgcagcatcacctactctccaggtgctggtgttttcattgcgcagcctgggctgagagccactgatctggactctagaccagcactgcccactagaactttctgagatgatggaaatgttgtctttgtgttgactagtgtgcctgagaaattgaatcttaaattgtatttaattttaatgacttagatttaattaattccacgtggctagtggctactgtgttggacagagcagctttagatttttggaacagtgtttccaacctggctgcatctagaaatgacctgggagcttaaaaaaaaaataagtgtctgagctccgcactaagctgattaaacaagaacctctggagtgggctgcaggagtcagcacttttggaaaccacccaggatggcaggggggcagtgtgcccgcagggtagagaactcactgtgttagagagatgctggcattttgttgttgttgttgtttaggcagagtctcgctctgtcgcccaggaaggaatgcagtggcatgatctcggctcactgcaacctctgcctcacaggttcaagcgattctcctgtctcagcctcccgagtagctgggattacaggtgcccaccatctcacctggctagtttttgtgtttttagtagagacagggtttcaccctgttggtcaggctggtcttgaactcctgacctcaggtgatctacctgccttggcttcccaaagtgctgggattacaggtgtgagccactgtgcctggtctgatgctggcacttctgaaaggaattgctctcaatttttccatggattagctaagaaataaatagaaatggtcattcttgtaattgtttatgtatgtgattattggcaaaataatcaccatcaagtaataatggctgaaactgcacatggtaaaattgttacagaactgaaaaacagatggaagaatcctgttggtaactgcaaacactgacttgggaagttggacttagtggaaataattccacaaaagaaaactcaaaatggcaaggagcaatatttgataaaacttaatgtcaaccaaaaaaaaaaattaaaaatctgtgagccaaatctgtgttgggaaatttaagcagggattaattgtccccaatgaaaagaattttggtaaaatgaaaataaagatggtaaaagagaaaaagaaaacagtttaattgctctgtatgcaaaacatatcaacacattaaactggcttcatttaatttgttctggaaaaatgccttctcagtggaaattaattactgtaggtgttttttatatttaaatgtttggtaaatataaacatggaagcaaaaatctccatggggtcaaaacatccacctggcaaagcaccatggtcaaaatgatgctcaccttgactgcagtgattcactaaccccaggcctaaccggtccccaagacagggggcccagatgcaacaaggaagcatacagaacaacctgttaaatgaggaggtctcaaataccacaggcgacaccttatattaaggcattaatcatcgtttctctgagatacagacttgagtgggctccctgtgtttttcctggtcactctaccctccagcctgaccgtgtccccagcctctctgctttaatcaagtgttataggaggaggtctagtcaggattgcctttaaagacgctctcttaggtgttcacagtggcattttctttggaatagtgtgatctactctgtatcttttagcgacctggtgactctgtaaagtgggcactgaggggcctctcacctgcactcagatgcctttctgccttcacccttccccatggtctgagcatcagtcatggtgcctgcaactggaggggacccaggagacaacctgagaactttcctgagccccaatgctccttctcctccttcctccttcagctgctcctcctcccacccccacattgagctggatgatctgccccagtggaataagcgtggactttgagaagagccagggtctagctgcaacactctgtggccttgggcagatcactacactccctgaaccttgctttcttccattcttagggagtatcaaatcaagggacctgccacaacgggggtctccctaaatgttagttctgcactgctgccttgctcttgttcccccgtgcttccttctgctgcccccaccactcaaagtcccactgacccagccctctcccaccaaaggctgctcttagccagctgtgggttgaaaaagcaccaaatcatatgaatgcataggtggcagcctatggcttcatgtttcactctattttaggaatcggcgggatgctgctttatagctcagactctgcttagaaaagagagaagtgttaatggtaggtgtccagccactgcagtagattatgaggagatattttaggaatggtgtatcttcttcctgacatagggccatctctgagcctggccttggtgccatctgggcggaggcaagggtggcctgatgcctcctatgtcaatgagtttcatttgttgagggaatgtggaggtttccaggaaggggctgaacatgctcttagttcttcagggtagccatgcatgggagacgacagaggcgcctggggagggggcctggccagttgaggcctgtctcccacacctggagtatgctggtgggattgaggggctctgtactgggaggggcaggtattctaattctcaggctgtccatcagagcttgcagggcaggggtggtggaatgagaatgagggtcaggggctttgctcagggaccccactgtcagcagagttctatcctggcactgtctgtaacctggacctctctgaaaccgtttcctcatcaggacaatggcaaaagcagtccctatgttgccaggttgctgtgaaatttaaataatataatgcatgtgtgtcaaatgcctgctcagtgcttggaatactgaaggtgcaatatatgggggctgttgggagcaggatccatatagatgcacttacgtaaaccacacaaacatgtgaacactatgtgcatggcccgtatggacacccggctgtacctgagtgtgcactagcattgcataatatgtgcacatgcatttttttaaatttaaaacaaccaaaaaatttcacggaagtataaaaaaacctaagtaatttttataagtataaaagtgcatttcattctcaaaaagttataaaggaaaaagtacaagttctcccatcttctacccatgaatttcttctcttttctccagaggtgcccattgttaacgatttggtgcgtatctttctttcttttttgagacagagtttcgctctcgttgcccaggctggagtgcaatggcacgatctcagctcactgcaacctccgcctcccgggttcaagtgattctcctgcctcagcttccggagtagctgggattacaggtgcccgccaccacgcccagctgatttttgtatttgtagtcaccatgttggccaggctggtcttggactcctgacctcaggtgatccgcctgcctcggccttccaaagtgttgggattacaggcgtgagccactgcgcccggcctggtgcatatctttctggacttttcctaagttatctacaggcatctgtttatacacatgcatactcatttacttatacaaaaatggaattatgctatatgtattggtctgcactttgcttttatcacttcatcattgactctttcccaggtcagtccatcacatttttaaatggttatgtggtattccgcggtatgtgtgcaccgtaatttaccccactgtactctcattgactgatatttagtttctttccaatgtcttgctctcgaatgattatccagtaaacatctttatccaaatatttttatgttcttatgctatttttttctttaggataggtcgttagaagtgggattactagatcaaagggtataagcaaataacattttttgtagattctgccaaattacttttcaaaaatgttgtcccaattaatgtccaccaacaatgcaataaagtgcctgctaatttatttttgctagtagaacggaccaaaaaaagttgtaatttgtgtttccttggccatttgtaaagttgagcatcttttgtgtgctgattgtccatttctatttcttcttttgtgattgccaatcattgtattttgggttgctcgtcttttccttttaattcataataattacatatatttggaatattattaggaatactaaccctcactctgttctatctgtataaaacttttttctctctgcttctcacctgtcagttgcactcacatggcaacaggcatttacccagaggtgcacgtgtgcacacagacctttatttgtttgttttaaatttttaagttcagggtacaggtgcaggtttcttacataggtaaacttgtgtcatgggagtttgttgtacagattatttcctcacccaggcattaagcctaggacccattggttatttttcctgatcttctccctcctcccaccctccaccctctgaaaggtcccagtgtgtgtcctcctctatgtgcccatgtgttctcatcatttagctcccacttataagtgagaacatttgggatttggttgtctgttcctgggttagtttgctaaggattatggcctccagctccatccatgttcctgcaaaggacatgatctcattctttttcatggctgcatagtattccagggtgtatatgtatcacgttttctttatccagtctatcatcgatgggcatttaggttgattctatgtctttactattgtgaatagtgctgcaatgaacatacatagcacacagacctttataaaggcagagtggcggtttgctgtgttagaagttgggaaaaggcataggcttggcctctggttttagcaagctggtttgccagcccccgcttctggcatgcttgggaggctgttttgggcaggattatttacccttcactgcctcattgttttcagcgggcccgaaagcattgaccatatccttattttcaaggatttttatgactatattttgccctggattctatccaggacatccctggctttcagaatcatttttcttttgtctttctctagactgaagtggaaaactatttagagttacccttgggcaggccctggggaatcagatactggccggaaggctgccagaggccaggggactcaggggctctggaatgtcctgctgttccctgtttcctgcccctcactgcctggcacgcatagcggagagctggaggggctcagaggacaggtgtttcctcccctgtatggcatgtgtctccttccaggacagggctctctcactttcctgtcacctggctcattgacgctaaccagggggagatacagtgagtcagtgatgagttactcgcaatacatatatagttttaattggcatgcgcttttcttcatttcaaagaaagaatgagaaatggatacatggtaacccttctggaacattttttttaattcaaatttaaagttgtaaaaatagtacaagaacatccatatattctttactcagatatacttattcacattttactccattagttttagtatatatgttttattatacttattattattatctcccttcctcccccccccccttttctttctctcgtctctcccttcttgtttctccctctttctcttactcctatttgaaggtaagtcatattcatcacggtctttgactcctaaatatttcagtgtatatttcttaagagtagggacacagttatcaacttcagtaaatttaacacgatgccatacttttttgtttgtttgtttgtttttgagacagggcctcactctgttgtccaggctggagtgcagtgctttgaacaaggctcactgtagccttgacttcctgggctcaatccatcctcctacctcagccttccaagtagctgggaccacaggcacaagccacctcgtctggctaatttaatatatatattttttttgtagagacagggtctcactatgttgtccaggctggtcttgaactcctaggatcaagggatcctcctgcctcagcctcctaaagtggtgggattacaggagggagctacagcacctggctgataccatacttttatctaatatattgtttgtattccagtcatgttaatggatgaaataatgtttttcatttcatagcaatttccctttccctctcccccagtgcgggattcagcctgtggtccatattgaatttagtcatgtttctatagcctcctttaatctggaacgtttccttagtctttgtctttcatgacaatttacagttttgaataatatagtatcccttttttctaatagaatgttcctcatttgggatgtcagcctaaataacgaacagagaaaaaagatatttgtgagggaatagagccagccgtgggaatatgcatgccatagtaaaccacatgagtatttaaggaggtaaagaaacacaaaggttttcagctgggtgcgctggctcacgcctgtaataccagcactttgggaggccaaggtgggtggatcatttgaggtcaggagttcaagaccagcctggccaacatggtgaaaccccgtcactactcaaaatacaaaaattagccaggcatgatggcatgcgcctgtagtcccagctacccgggaggctgaggcaggagaattgcttgaacccaggaggtggaggttgcagtgagctgagatcgtgccactgcactacagcctgggtgatagagtgatactctgtctcaaaaaaaaaaaaaaaaaaaaaaagaaagaaagaaacacaaaggttttttagaggaaaagaggaaaataatgaggattacataattattttgaaatattatccttggctataaaaatcaattacaagggtgattctggtccagggttggactggtaattagtgggcagatgttcttgcagaagtgttttttgagtaaggctgttatagcctttgtgcaagactgtgtttttgcagtcttttgtgagggtttttgttatcaggcatacaagcatgagaaccctctcttcatggccttccttagctctttttgttagggttttcttaacattagcgactccatttttattctgacaactttcgtggcagtttgtttgatgttttctcatgcttagattcaagcttggattaggttactcatccctggccagaacactgtctaagtgatgctgtgtctgtctccggatctggaggcacatgatgttccttactggggaacgttaatttcaatcacctggtcaaggtgttgtctgatttttccattgcatatttaaagttcttttctcccccttgaagtttgttaagatgtacttgaagatggtgcaaatatcctgcttctcaagaagatgtccccctaaacttagcatccatggatgatccttgcctgatccaatccttaccatgatgggtatgagctgattttcatctccagcactccttccacatgtaccaggctaggctgtgtgaggctcttgtggtcacagtggtgctggcataaccccagggccaccacgcattgatccctacctgtgcctagcactgtgccttggtgactcatgccttgagcctcaccccttggctcagggccattctctcagagttgaaagacctctgggtcattaggttgggtgtctcatctcttccatccttgatagacagtgttggagtgagacagacacccattctggggctggattattcattagaaagtccttccttctattggctacagtttttctccctgacattttgaggatcttatttctctaccctcaggaatgatcaaaaagaaatctaaccctcttgcatatgacagcacttcaagtcatggtctaatatggtgctgacagtcactgggtgggatgggaatgtgcagagaagcacaggaacatggtgagtggggaggggaagaagggaactgacacctaccaagttctatctaggttccaggcacatgtggggggtgataggtgtattaactgaaattttaccagaactctctgaagtattcattatttcctccaagctccaacaatgcagggtgggttgtccattttattctcatcagtatccccagtacctacaaccgtacctgacccatgagtggtgctcactacatatttgttgaatgaatgaatgaatgacttttacagatgaggaaacagtctcagaaagtttatgtcatgtgtgcccagccacgcagctggtcagattgcagggctaggtttctggcatggtaggatgacttgagggctcttattgttaaatcactgaatgattaatacttttggaagatagttgagagaaagaacattttcaaagtgttgctgtaggttgaaaggtacagtttgaaaacactgggttggtgagtgtgacatcctagggtcaaccacctgggctgttccatgaacccaatagaacaggagctatgtggcctgccagcctttctggatcactttcctttggggcatttgggagaaggtagcttgtctcctgtccacttctttttcagtctgagccgtacccactcctcccatcttcctgcagctaacatggctctcagcaccaggggccgtggtcctctaggctgccccagccctggttcctgcacacccacattcttcagcttaaaccgccactgacataggggaaggcccggagtcactggggcaggggctctgctaccctctgcaggcgtggaggcagggccctaaaagagggaggagaggtggaagagaagggttcactgtgggtgtggaggcatggagaccactctcattggtggctctcttctgggtcctcaggcatcctaccacagggttgcctctctctgacccacttgtttctctggggtctctgccagctaccgtgatgcagagctgcaccctcagtgcacccttctcttccacctcccctccctctttagggccctgccttcaaggccacctcctgaaaactccaaatgccatccctgcatagtgtagactattagacctcccagcctcctcttcatatgatactttaacccatctgaaaaatagaattaattagcttttaaaagctttttaaaatggccactcaaggctgggcgtggtggcttatgcctgtaatcccagcactttgggaggccaaggtgggtggaccccttgagcccaggagtttgagaccagtctgggcagcagagtgggaggccacgctgtgcagggccacacagggaagtgctggggtcagtgccagaatcagtgcaggggtcaatcaggaggcagagagagcgaggggaacacggggacaagcgcctttattgtggtttccaagggaaggaatgggcgaggcagggtaaacaggcctggggactggccagtttgaataatttctgtgggctctgggcacacttacacgtagacatatagctgtctatgtaccgacatagacggtaggggctgtcctgagttgctggaacctggccctatggtgcttaggacaggggaatgtgggccctgagtgtgacaggctgtggaggaggtgtggggtatgggctcagagtggctggtttgcatatgaaaggcctgctggtaagtgaggagtcctttaccatctccaggaattctgggaagagagtgcctccaaggtcaacaaggctccagatgtcgaagcatcagaaatacaaaaaacatagtttggcataagattaaaaaaatatgggccaggtcaaatgtatagactgggctccccttcccacggattaagcaaaccaatgacctttctgtttctttcatgatgcactcatgggcctctaagatggcacaggaggctcactgtagagttcaaagcaaagcctcaggctctgtcagccttgttatttgtgtgaaatcaggcaagtcaaacaccttcccaagtcccagtttccttgtctgtgaggtggactgaactaataacagtacctaccccacaggactagtgtcctaatatgtacctagttgatgtaactgccctacagattcatcgtgctggctgccaagatagagctgatttatcaagacaggggaattgcaacagaaaaagagtttaatactgagctggctaaatgggagactggagtgttattcttactcaaatcagcctcctcgaaaattcagaggctagagtttttaaagactgtttggtggtgatacggtttggctgtgtccccacccaaatctcatcttgagctgtagttctcataatccccatgtgctgtgggagggacccagtggtaggtaattgaatcatggggacagttatcttcacccggttctcgtgatctgaggttttataaagtggttcccacacttcactctgtacttcttgctgctgccatgtaaagaaggacatgtttgcttccccttcccccatgattgtaagtttcctgaggcctccccaaccctgctgaactgtgagtcaattaaacctctttcctttctgaattacccagtctcaggtatatcttcattagcagtgtgagaacagactaatacaggtgtgttcccagaccaaaccgagggtctggctgcttattctcatggcccaataatgagatgaagatgaactgggaaagaagagagtttatttctgtaatcaggtacaggcagaaggcctggaaaatatcagcagatcaactcgaaattacaaagttttccagagcttatataccttctaagctatatctctacatgtgagcgtgcattcttctaaagacctaagtgtctaacttctttgaatctataactaaaactaaggtctgagttttgaagaccttcttctggagcctcagtaaatttacttaatctaggtgggtctaggggccaggggtgattatccttcgcttgtctcctgctaaatcatggaggtttggggagatcctttagacccccaataaaacttgattgttgaggcctggggagtttcttcagacccccagtaaaaacttgtttagtcctaaatgggtcctgttaagaattcctttgttatcttgtcatgcttcaagtccccggaaaggcctgggcaaaactcttggtgggcttttgttacattccagcctttgtgtgatggcactggctctatcagctttgaatgtttaacttcaccactcagtcagtgctgaaacagctgttatgaagacctgcctgttcagctgttagcgagatctggcctgccacaggtgggcagggggctagggaataggagtgctgatttgttgggtcagggatggaatcacaggaagttgaggctgtcctctagccatgagtcaattcctgggtggggaccacatgaccagatgagccagtttaccagtctaggtagtgccagcaggaatgcagtgtctgaaaaatacctcaaacaccaatcttaggttctacaatagtgacgttatccataggagcaactggggaggctcggaatcccgtggcctctggctgcatgactcctgagtcataattcctaagcttgtggctaatctgagttttacaaagttactctggtctccaggcaaggacgaggtttgtttctggaaagggctgttttcatctttgtttcaaagttaaactataaactaaaattttctatggttagctggcctatgcccaggaatgaataagggcattttggagattaaaggcaagatggagtcggttgggtcagatctctttcactgtcatcattctctcatttttataatttttgcaaagccggtttcattaataggagggttgctattattagcatgcaagttccatgaggtcagagactgtattttgttggacatactaaataagtatttgttgaatgaataaattctaagatttttaaggagtttttacgttttgtttttaaatttaattttttacgttggtaaaaactttaagaagttgtaaaaacagaaactatatttaaaaacgcagtgaaaattctccctggcctctttgtccctgatctgcccagttcttgctgttccctaacaggtaacccctcttcttagtttcttatggatcattccagagatcttatattattgcttaatcgcccatatagattctaactttcctcttttttatgcagcaagtagcttattatacatgctcttttgcaccttgttttatcacttaacagtgtatcttgaagattttccatgtaagtgaataattccccattattgttatagctgtctagtgttccattgtatgaatgtactgtactttatttacctgtcgtctatgatggacacgtgaattgcctcctgtgttttgttttgttcttacaatgatgtaataagacccaatgttttaaaataaaattgttttgatttctttgtgctttattaaaataaattgacttggccaccatgattcccaccctcccacatgctgcctaaggctaaggtttgggggccacccatgcctccttcccttctgccatacggcagtagtagcacccctggatggtgagtttgggaactagttctttttctacggaggaaaagcatgtgccctgtcagacctcaagctgccttggcctctccttcccttgcccatgccagttcctgccttctctttctttgggttggcagcggctctttcggtccccacacttctccaccccccacattccaatggctccagagcacagctagccaagaggtctgaggaggctgggagcacctgtggtgttttcctccatgtgggctgcagggggtgtggccaggacccacgggtgtcatttccacccatgtaggctctgctctgcacacactcatagctggccctgtgcaggacccctggccccctccttgcctcatctgagcctctggaatcctgtctgccacttgccaggcccctggttggtgccgactgagagtgcagcatccctgatgagcagagggcacctggccctggagcctgtgcttcagtctgactccagatggggcgggtctcctcaagggccccagacctagaggcccctggataaagccacatctcctccatccctgtgaaatgaatggatgaatgatgagtggccttctgggttttctgtgaccaacctcagacccctctagcctcccaggggtccctcttctgcgccccccacctctcctccctgagcaatgcttcctgggaggctctgaatttctgactcttgtgaacttgactaccacagcctgctccttacactgcgggagaggcagcctgccctgctatttccagcccttccttctacaggagtgggggctggtgaagccacccttcttggagggacttgcccccaggccgatagcagggtttgggggtgcatttcatggccccaaaaagcatttcagggaggaaataacaagcagtcaaccctggctgctgtctcttgggcatccaagaggcaccccaggctggcaggggtgggggtgctacttccttctgcatttcctgccattgttccctgacccacttccgggaattctccctgggctgggagggctggacaaccagcaagggaggcagaggaggtctggcttttctcggcaccctatgacctggctgctaactctgctctgctcagtcctgagggctcctaagctggagctccagctgccatgtacagctctctggtccatgaggcctccttgggccctgcctcccagtccccaaggagagaagcctcagtgctctgggggattgacagggaacctagatacccgggtcctggggctgactcagccattctcctgcttgaacaagtcactcccctctgccaccccagttttctcgtgatgggcagggttactctgatctctgatgtcgcatggactcatgcatcctctatacctactgtctggtctttttgacattgtctgggtcctgaggacaattcagtcaacatactgacgggtgccttctggcaccagcccctaggatggagacactccaggagccccagcttattaagtgatggtaaaaatcctgctccatgctgtgaaggaatggaacacaaatcagtttacattctagaaaatatggctcctaacactgtgagggggtttcaaaccctggattgaatattagtgaatatctctccccctctatccccttctttcagaaagggttagaaaatggaccttgagcgtatattacatttactgccttgctagcaagggcacgagcaaggcggcagagtctgttgctttcaagaaggatggaaaaagagggatttcattgttgagaagcttaaataagtggctagtttttaattttaagttttattatgataaatcgacataaacgctaccattttaaccatttgtgagcatacatttcagtggcgttacatgcattcatgatgtcatgcagtcattcccaccgtccacctccaaaatgttctcatcttctaaaactgaaactctgtaactgttcaataataaatcctcacttcctcctccccccagcttgtatcagccaccattctactttctatgaatttgactactctagctacctcatacaatatttgtctttttgtgactggctgatttcactttgcggaatgtctccaaggtccatccatgttgtagcatgtgtctgaatcttcttttttgagactgaataatattccattgtatggatggaccacatcttgtttgtgcctctgttgatggagacttggtttgcttacacctcttggctattgtgaataatactgctgtgaacacaggtgtgcaaatatctaggtccctgatttcaatttttttgggggtatataactagaagtggaattgctagatcatatgctaattctaggtttaattttttgagtaactgctatgctgtttcccacagtggctgcaccgtttacgtccctacacaccatgcacaagcattccagtttctccatatcctggccaacacttgtgatttttctctccatgactctgtgtgtgtgtgtgtgtgtgtgtgtgtgtgtgtgtgtgtgtgtttataatagccatcctaatggatgtgaagtagtatctcagtgtgagtagtcagttttaaaaatcacctcgttaggtcgaggttgcagttttatttgatagggtcataaaaatctatattccaatcaatatttgcagagaccagaaaagggatgagcccagatgacaggtgtgctgttcatccatcaggaaaaagcagttaataagtacacctgtggctgttcaccagcctaacatggccttgtgccctgacagtaatgttcagggtaagtccatttctcagggaggcaagcagaagtcacacacagacaccaggcgacaggttcctacagtcacaggccactcactgcccatggtttcctgctgcctctacagaggggcagactatatggtgagcccacttcatagcttcctctgctctctttgaagggagcatgtgccaaccatcgcgctgctgacctactctttcctaatagcccatacatgtgccccacccctcctgtcagtcagaaatgcagcctctggtgcgtgtggtatggaccgcccagggcctctcaggagtggagcctgtttcccctgccccaatatccttttctccctgtccctgaagacaggaaggtttccttgcttttcatgtacaatcaatcactgccggcggagccctgggattccaatacagacggcctgtgtagacatgggtcatatgatctgctggggctcaggggcagtgtgggggtgatgagatactgacctggtggactgtcaagggctcatgggaagacaacccttcatctctggggaggcgtggctgggcctctggggaggggcaggaaggggtcaaggtggaccttggagaaggaaaggtatctcttatcccttcccatgcccaagtatttccctaggggccaggccttccagggatggtgcatggtggtgactgggtgtgggggtgcaggagagccctcgtggggtgctgggtgactgtgtggtctaggcagaccagcctcatctgagtggtggcagtgaggggtctggcagaagagccagggtgccttaggctagttttctacatttgacttctctctcctctcaggttcctgggggaagccaaggtcccactccgagaggtcctcgccacccctagtctgtccgccagcttcaatgcccccctgctggacaccaagaagcagcccacaggggtaagtgcccatcagcctctgccaggttaaggtccaaggcattgccaggtggcttcctctttgggccttgccattctgaccccagacatgcatctgacttcagctcccttgaagcaggcctggccctccctgaccagagtttgcagtgtctggaggggcactggactaggggagatgggaagggcagagggagccctgaccccacctgcagggctcaagtcagccttggctcgcagcagcttggcctgccccttggtctggtgctgccggtctggccacctcctgtccccagcttcctggtcagccttggctatagcccacctagtctccctggcagacctcccctcctccctcaccatccagccctcttctccagattcagaatctctgaaccatctgggtcacagggcatgagggatggagggaaagagccctctcccctgcccaccaggaccctcttccttttcctccgttgttcttcctgcccctccctggccttctcagtgctccccccaagtccaatcagacaattcccagccctcctctctgcctgttatttttagtgagctaaatataccctgtagggttctctcttcttggtagaattcctgacctctcctgtgggttagccccgccttccaggatgtaccaggaaccatggattggaactacttccgccctgtgaggcctgggggattcaggccctgacttgtctcagacagggcagtggtactgccccgtggcgggtgtgtgaggccggggctcctggctggctgggtgagtcaggaagtagccggtctgggcagatctctgaatggaacgagactggatgctgagacctagagaaaaggaaccactgaagtcacatagtcagtggctgttcccatgggggcctggaccaggagctcatcccctagaccctctggtggaatggctgtggatggactcctggttcactgaactctcagtctgctgccctctcggtgctggactttgctcccaaggggtcttaggctggggatggctgggctgctcccttgatggaagatgtcacttcccaggaaagtccatctgtttcccacacagggctcactggcagaatgttctggtttagagcagtattcactgagcctgtctccatcaccctgagtcccctctcatcctccgtttcagcctcctgtctcttaacactccctgtggtcaaggaggaccccaaggagttctggaactaccccttcaggggtcctgaggaggctcagacccaaccctcaaggcatgggacacagatggagggatgataggtatcaaggcagctggcgagagaaagccttggggtcaggcttggttctcacttccttgctgggacaccagcatctctccactccagctctgtgtgcatccatgactctggtgtttcctgcccttcggtcccttccaacctcaaaggcctgtccagccccgaggcagagttttccatagctggtccctattcatgagccgtgtcaggctggagccatcccctccatacctcccttcgcctcctcctgctccttgttcccacactgtctgggcttcatgtttaccagcggggagcctgctgccttctcttccctggctggggattcctggctgtctgcagagctttacaatccttcaccaaccgtgtctccaaaaagagtgtgtgagatccaggaggtggcggatgggagagagtgctggaccctgctgggttgagccccactagctgagcacaggctggaaatggagttggggagcctcctccctgttgcccaggaggcagtcctcacctgtacagagggtctaggactagattctagtccatgtgatggcattaaggtcacagtgcagccccagacaggtcatatgtccctttgggctggggcttcctgcctgggacctgggctggctgcactgtagtgcgaggcagggataactgggggtgtgctgggcagggacagacagccaacaacattgagggttctcgctggccgctcactgagacctcatttctgagctaagcccaatcagcagagcatgccaggtgcccccatttcattgtagctctcagttgcctctaagggccaaagaacctgctgatggggtgatacgagtgaacacagagccagtgggatccttaggaaactctggcagactgagaggcgtgggggaggccgggagtcctgccgcaggctgactgcagaccccgtttgccttttgctcagtgttctcacccaagtcccttcagatatagcacgctgggctgtgtgccatggaggatctggctatgtgccaaatctaccctctgacagctgctaggttgatggggaaaacactcccccagtcctggaggaacctccaggccatggggatttaggacacacatggaggaaaagaagcagcatcctctcagatgtattttaagaggagctcactcaggaaggtgtggatacatggagaaaactcagtcggcatcacccgggccttaaagccagaatcggatcacaaaggaggacaagagcctacgaagcccagtggtgtgtgggtcagggaagccaggagggcactgtgtgttgggagcggggacctgaggcgggcaggacagtgctcagtgagtccctgagctttcttcaaaggtttggagcttctgccaaccaaccctgtatcagctcagggccacagctaccctctgcctgcttctggaggttgtctgagggagaggttagtgagggccacgcacatatcaggcctgtcttgtccacacgggacacatgtgttaggggaggtgagagtgggctggtctgggttttggttttgatgagctcagtgttggagagctgtggtcgaggaagtaggtggcgcacaatgggctgggcatggcagggtgggcgaaggaccccagagcctgaccacataacctggaggagggtcacagccagggagggtctgaggaggtcattcgccttcagtttcctgagccctcttagcctggggcaagacaggagtctcaagttctgctgatctcgttgattgtgggccccaaggcagcagacgagggcgaccgaggttaccctgctccagggcagcgtgtttggtggacacacgattgactgacaatggccttgtgcgtggagaaccctggagtgctgctgagttggagactgaggacctgggctgtcaggcgcgggacccgtgacgtggaggaccttgaggaaggtcccactgggagctctaggcccaggttgtgtagtccgggagagcacagggctcacatatatcccccaggaagaaaatcttagctctatttgtctagagaaggagacaggggttgagctgtgatgtcatggtgagggtacaaggtcctggtcctgggtggggcccactgacacgcccactttcccttaagagcctcagcagagccaaagaacttcagtattcaccatcagatcctgaagccatggtccctggggcccacctcctagtgctgaggtctgttctagaccctgagctccagagcctctggagctgcagggatgtccctgtggctctctgatgggcagctagaagacagacctgtgctggaagtctcattcaagggcccagagcaacccggatggtgccagttcttcaggaggttggtgtggagctgtcggtgtagaaacaccggatgctcaggaaaccccagaaggggctgcctaagtggtctctggagccctctctctggagagggctgctcctgtctgcatcccggagagggctgctcccaagccccagtgctgaggagctggcactgggcacggtgtggaagagttacactccggcggctccacctctcacagagatggtgtatagaagcccccaggtggtgtgcagtgagtggatagcagggtgagcccctagaaacaggaaggggcgctcttccaggggacctgtttccaaggtcagaggcccaagggcagcccaggtgtggccccttcaagtttttgcttcactctcctcagctcaatggggtccactcagaccgcttgatttaacactgcaatctgcaaaatgtctcattcccctgatccttcttgctctggtttactttttcttttctttctaacatactctcttctttatgtatttattttgtttattatttattgtctgtcttctctgccaagacatcagctccatgggggcagggacctttgccttatttatggaagcgtccccagaatcttgaacagtgtgtttggccctggcaggtgcccaacacacaggcacgtgtgcgcgcacacacacacacgtagagggaatgaatatgtgagttaatgaatgaatgggtcaggccagacatgtcaggcagggccctcagtgttcatctttcagatgtgggcccaactcaggccaagtcaaacaaacaccccccacaggcctggcctctggggccactgcacggagccctgcgctcacaagggcctcatgcttggcttaattctcttctgtttccatcttgaaattcttaaagctcactgcatccttgacctccggggctcaagtaggctcaagtgatcctctcgcctcagcctcctgaatagctgggactacaagcatggctaccacgcccaactagtttttgattttggaataaggggctctgcattttcatttgtgctgggcttgcacattatgcagctggtcctgacctcatgctaatcttggagggccggagtcagcatggatgggcagggggctttatttgtctctgcctaaggagattcctgtggctattcctaaaaagaagcagattttcaaaaccttttatttggaaatatttaagatctagacaaaagttgccaagtatggtacaaagagtattttgtcctaagccatttgacatgagggtgccaacctcctggcccatcattctgaactcgagtgtgtgttctccagttaaggactttctcctacataaccacaacacagccttccaaacgatgaaattaacatggacacagcactctcgtctaatccccagaccccagtcgcggctcatccatttttcccagtgtcctttgtagcagaaggatcccactaaggctcatgtgttgcacctagttgttttgtttcttcagtttccttccatttggaataattcctcagtctttctttgacttttataaccttgtagctggatatttttttgaaattccggccaattatttgtagaatgtcccccacattggttttgtctgatgtttcctgtgtttagatttaggctgtgtgtcttgggtgtgagtgtaacactgatgctgcgtggctgtctttgtgccctatcaggtgggatgattgtgattcgtttggttaccacactgttaactgtgatcatttgattacactagcatttgctgggtgtccccgctaatcgttcatctactcccctttctcatgtcagaattttgtgactttgtaatatcctctttgtcatctaacctttacccgtgagttctatgagctgttgttttgtatttgtatttttactttttttgagacggtatgtcactctgctgcccaggctggagtgcagtggcacgatcctggctcactgcagcctccgcctcccgggttcaaccaatcctcccacctcagcctcccaagtagctgggattacaggggcatgccaccacacctggctattttttttgtatttttatagagatggggggttttaccatgttggccaggctggtcttgaacccctgacctcaggtgattcacccacctcggcctcccaaagtgctgggattacaggcgtgagccactgtgcccagccgtcatgaagtgtttttgtttttgttttgagactggtctcattctgttgcccagctggaatgcagtggtgtaatcatggctcactgcagccttgacctcccaggctcaagtgattctcccacctcagcctcctgagtagctggaactataagcgtgggccaccatgcctggctaattttttgttttttgtaaagatgagggtctcactatgttgtccaggctggttttgaactctgggctcaagaaatcctcctgtctcagcctcccaaagtgctgggattatagttgtgagccactgtacctggccgtacccaggagttttaatatcactgctgtttcttggttgaattcattattgctttgatgattgctaaatagtgatattctcagttatttttcctgcattagtcagttggcatttcgtggtcaggaaaagctttctcctctcctatttatttactgtggtatggatttgggtatttctattttattcaattgtttaatctgttactgttattatgtattttcatgtttctattgtctcagatttggcctgtgggagctcttgaaagttggcttctgtgtccttttgacatgtttttactttttattatttatttattattttattttatgtttttgaggcagagtcttgctctgtaacccaggctggagtgcagtggtgtgatcgactcattgcgacctctgccgccaaggttcaagcgattctcctgcctcagcctcctgagtagcagggattacaggtgcatgccaccacgcctggctaatatgtttgtatttttagtagagatggggtttcaccatgttggccaggctggtctcaaactcctgacctcaagagatccgcctggctcggcctcccaaagggattacaggcatgaaccacctcgcccaggctcttttgatgtgtttttaagaatcagtcattcattgagcatttccttcctttctggtgcaagaagatggtccaggctcatcttgtatcttccctgccctagccctggaagtagttatttctccaaagagcccaacttaccttttgctgaagtggaagaaagtcccaggacagttgttaaaagtgcaaatacccaggcccaccctagacctactgaactggcatctctaggagtcaggtgtggcatctgggcggaggggaggactttcttcttttcccctccacgggttgcaggagctgaagggactggctgctcacgtggcgacacctggtggtgattcaggaacccacagggcaggttatgttcattccttgggtgagggaattcaagggtctcagttgcctttgttgacctcctcctgggtctcctgggatgctgagctagctcttgtctccttcctcagtgttctgagccctgctttccaccagtgctgctctccttagtgtggctgtccccaggccccagtctggagagttcaagctcaagagctgagtatgtcgggagccttcaggcccttctctcttgggactgagtttgctctgtgagtccctggacgtccctaacatcattcagcagaaaggtccagtgaactgtgccagagccactcagagggacattatgcctcaggaaaaattgtgtttataaagggtttgtcaaaacctggggagagcttattgcctgacattcagtaaaagaaaatcattttgcatacagcagatctgtctactatttgtttgaaagattggagagaactggaatgtggagtcacggaattatggacaattggttttcttttgccttatttttcctctttaagctttctgtgcttcccaaactttcttagagtatccgttgcactaatttgagagactggctgccccaggaggcttgctggacctgtggagccgggacagggctcaggcaggcccgggagcagccaggctgcagatcctgctgaggttgtgccgttcccaggttcagggtgagggttggggtggggtgggcgcatgggcaacccgacctcgcctgtgagggatgtcaccagtccctctcctctctggccggtgcaagccggggcagctgaggatgtgctggggggcaggaaggaagagggctctgcaagcctggcagcacactgagaccctctcagtgctagctgcagcctgagcaaagcagagcaaagctgagttgtccctggagaagtaggggcaagccattgactgagcagagtggccaaagggacattttcctgaagacaggccaagtggatagtgggaaaaatcctgcaggtgaggttggatccctgattcatttgcagaagtccactacgtgctacatcaactaatttgctccacatttgacctgtgaggaaggtgctattgctatgactaaccccaattttatagatgaggaaactgaggcacagggcggtcacagatcttgcctaaggtcacacagctcctgagtggtggaacctgaccccggattctgtgcttcgaaccacctgactatgctgataggtcccttggggtggctttgccacagcctcctgcaaacctggctcttgtcagagccatattccttggtggagggatgccagaaacagggaagatactggagggcagtggtccgaggccagcgcaccaacctgtcccccacgtctcatctcttccaggcctcgctggtcctgcaggtgtcctacacaccgctgcctggagctgtgcccctgttcccgccccctactcctctggagccctccccgactctgcctgacctggatgtagtggcaggtgggtagcccacgttggcctggctgggccccagcaagaaggccggcagtggcacttgagcctgggggctgggagctgcagcgaggcttcccagcctttgctgccctccccaggttggaggctgcccaggcctggaaagaagagggtgcagtgggtgggaagtcctgagggctgccttctgctgtgcagaaagaaggggcagcaggcacgttcccttgggcggtgcagggagtaatgtgagggtgcctccaagccccagctgcctggggacggggctgagcccaggctgggtgttctgagctgtgcagttccaagaagggtgtgtggggatggggtctgacccaggtgatacctgaggccccacaaactccccagaaccgaatgtttccctacctcagcacccagcaggcctttggtgatggtgtgtgacaaaagaactagttttttttcttgaaagagccctgaactgaacttcagggttccagtcctgcctttgacactgagtctctgtgtgactttgggctgattactttccctctctgggcccatagattatttgtgaagggagcagactaagttagctaagtgctgtgcctgtctcagctctcttcacttggttctgccaggctggtcaagcgaggacccagcccggggtggctggctctccactggtgggcctgggtgtgggagcctccatgtggtccagcctgctggggttgggaggaagctacatagacgggctagtgggcacttgcccatgggaaagattctagagtttttctcttagtgaagggagctagaagcaagcacagcattaaaaccggagcagcccatgtctcaattgagtgtgccctgtgcctgacctggggccagcccagcacagggctctgtggtgaggtcggcagagcagagctgtcttgttggggctcagcactgtccgagcttagagatgggagatcagtctggactggagtaacctggtaatcctgagctgtgtggctggagtgggctcaggggaggaaggagaggtgcccgtggtggcagagggtggggagcagggagggtccgaatactctgggactgtgttgaggtggatctgacagagttaggtgcaggccaatcagtggaggcttccagacacgcctgggaggtggtgagaaggaacaggtgccactgggctccacagctatttctgagctttgcaccaggctggggtgggcggggaaggcagggttggggatggaggtgcagtaggttggtttccttcaccccaacctcctccctcccctcccggggttatgccctgcccacaagacaggcgggggacagagccgggccgagacttggtccctgctcagtgacagcaccatggacacgagatactctggaaagaagtggccggcccccacgggtgagacacgggccaggactgtcctgatcccagaccctccctgtaactgtctcactagctgccatggtcagcttgctggagcggggccaggtggcagaggactcctcctgcaggacttggcgggtgggagggctagggccattctgttttcttcctgttgactaactggactgactgccctcaagtttcagctgctggaagctcctcttctttctaccttatccatcctggctcactgatggggagggaggagggagaggaagaggggatgagtcttagggcccatgccttttggatcttctgccccctgggctgggtcccaggggcaggggcaggggcagggccagagggatccaggcctcattagggccctctcctcttagacacaggaggagaggaagacacagaggaccagggactcactggagatgaggcggagccattcctggatcaaagcggaggcccgggggctcccaccaccccaaggaaactaccttcacgtcctccgccccactaccccgggatcaaaagaaagcgaagtgcgcctacatctagaaagctgctgtcagacaaaccgcaggatttccaggtgatgaacgggctttctctgaccccaggctcctcttcagccatcagctgcgggtgccaggcacctgcctggtttgtccagcttcaggggaagatgtgtgtgggatcctcagggccctcctgtgggggaatctgtagtttccctgggcctgggcagatgccaaacagggagttcacatcttacatccacagaataagcttctgccgagacctgtggttttgcgcttaaaaaaaaaaaaaaaaaaaaagtcactgcagagattcagcatgtctttgcatctctgatcagagaaaaacctgatttttctaaccagggtatatccaaccagcaagctcctggctattcaggtgtggtctgtgtccagcaccttccgcatcacctgtatacttgttagacatgcagagtctactcagacctgctctaccagaatctgcattttaacaagatccttacctcaaagaagctctgtctaacatcttttttttctccttatatctatccccctgcatatagccatggatttttctgagagtcatgtggaatttgaatttgttcaagctcatcacagaataaaagctattaatatgaacactttgacacatttttatccaaaaatccatcccattttatttgcttttaactttggtcctttgcctattttttttttcttttcaaaagaattttctattttgatgtagtcacacagtgatatttaactctttacaactacttttaaggttaaaagcaagaatcttaaatctctatttataatactaagtgcaacaaattgcaaaaatatatttctattctaaatcatggtaatttaagcagaagtcctagctctaaccactgtttgccccaaaagacaaaattctagcccccatactactattccccaaacatgttcatattgcctttgttctctttatggaaataccatatgtttattttagacactttggaaaatatattaaaatgaggagattaaaaatcactcatccatcttcccattgctattaagaatatatcctcccatattatgcaatttacaaaaaaaaaaacagttggtcagtaaataacagttgattctaaagtggagccagtaaatatcttatttttttccatagaattgccttaatattgtaaaatttcatattttaaaatatcttacctaatatttggaagcatagacgttcttgaagtcttcatttacttacagctcaatggcaaaaattcttaatttatttctcagaatgtaagaaagcattgcatcttataaagaataaagactatttctggggtcacttcactgtgtaagttcgacctctgagggaattgtcaataaagaatattcaagccacttaaaaatgccagtatcaatggggtctcgggtggggcttgtgccaatggctgaatgacataaatgggggctgtatctgcccacccctggggtttaatgtgggtagccgacgaggggcagcctggcagctcttctatggagctgtggaattttatagatgtaaggggccttggtgggaaaatatgatagttcgtataatgctcttcctaattcctttttaatactttccccaagaagccagtggtgagatggtccctgagatttctgactcttggggtggatggtgggtggtccttaactcttcccccttcctcctgctctttcctccttctggctttcagatcagggtccaggtgatcgaggggcgccagctgccgggggtgaacatcaagcctgtggtcaaggttaccgctgcagggcagaccaagcggacgcggatccacaagggaaacagcccactcttcaatgaggtgggagacatggggcatgagggccagaaccttggtgggccttccaatctggaagcccagtgcagacacctggcaattcattcaagagtgtttacgtatggcgctgaccttgggtggtgagatgtgctggctcccaaggaggttatctgtgggactggagaaagggctcctgctcttacttctcctgctgctccacatccctgtcaccctatagggccagccacccacccaaccctgaaatgaccacgtctgtgaggccaggggcagatcaccccagaacttgtccaatccccagaactgtgcccaatccacattttctgaggggactaaactgctaggcgtggaggcttgggggtggtggtcctccctctccctggcctgagggatcagcaggcactgatatgtctctctttgctctgaaccaacagactcttttcttcaacttgtttgactctcctggggagctgtttgatgagcccatctttatcacggtatgtctcagcagtcaaagtgttctccgtgggctgtatgtatgcacataggtgtcagtgcacacgcgtgtgtgtttgtgcacgtgtgtgcatgtgcacgtcagtgtgaatgcgtgaatgcgtgtgtgtgcctgtcggtgtgtatgtgagtatgtgcgtgagagggagacgtgttaaagcctgacatatggatgatgtggagtaactcacagtcaggctctacgggtcacagaaatgcctgcaacagctcagctggcaggcagcagctgcgggagagcccactgctcagcatccccctggggcctcaggtcagggtccttaaatcacttgtggcaatgaacatttaaggttccatcttattttgttaatccacgtgcctgcttctgactgagattctctttctctctgggccttggctcttcccccatctcctctgaagcgcactgcagcctagtggctctaagtgtaggctccggcactagagtggattccagctctgtctatgccgtgtagggattgtgttttctgtacaagtctctgtgcccctatttcacctgtgaaatggggataatgacagtatctgctgatggggttcctgtgagggctaaacactgcttagaacagtctctggaattgagtaagtgtgaagtgttggcagttattgtttgggagggaagagctattgggttggccgtgtgggccacatgttccctgtgaatgtgagtttccatgatctttctctgcaggtggtagactctcgttctctcaggacagatgctctcctcggggagttccgggtaattgcttattttctatgaaagcagtcagttctcacttctccgtgttggtggagcctctgtggaccatgggcaggggctccagagatcctgtgtttctctgctttgggaaaatataatttcaaagaacaacgccaagccctctgcacagcatctcctttcaccccagaaaacctctccacaaaggtagaagagaaagaaagcactttttgtcactgaagaggccttaaaccagagtgagatgtacatcacaggcaatgatccactaagatgctgcaaagacagaaagaaatctcacgctaatttagccagcgggtccaacccattgcccaccacatacgttctcaagagaagctatgccccaccctcaggtcaggggactttacatttcagacctcctgagaatgacatttgtatactaaagctgacaaatggcttatttagtttcttaaaaagatgtatagcacctttggtcacaccgagttcatcccaaagtcacctggtaatcggggtgaccatctatgttagctaatttgttgtgtccagaagaccaaacaaaaatcaaactcatatttttatgacaggaagtagttttacaacttggagcaaggtgcgcacgggagttaggctcctatcttccgacagaagctgggacacaggggagccgtctcccttggtgtttatatttcagacgtcctgagaatgatatttgtatactaaagctgacaaaaggcttatttagtttcttaaaaagatgcatttcaaagagacagggaaagtgtaatatatttacaagttttctaaggtaagtgttctgacaaaaagagaggggagggaagtacttcttcccttatttccaacaagcagaatcaagacccttatttgtaatttggattttcccccacctctgggaaggccgtgtgagatctgagtttgggcagccctcctcctcatcctggccatcttgggccagtgagacccagcgctctctgccctgacatcactctcaccctgggatgggagtggggttcagatatggatccctgggggagggagaggcagtggagagaggggaaccctgccccagcctcctcacttgtcccagacagtccagaagtgaatagtcctcttctgagaaccgagagccaatggatttaacagattacgtaaagtaaaggtaactagtaattgcacagactaaaggagacctgtatgatttttttttttttttttttgagatggagtcttgctctgtcgcccaggctggagtgcagtggtgtgatctcagctcactgcaacctctgcttcccagattcaagtgattctcctgcctcagcctccccagtagctgggattagaggcgtgtgctaccacgcctggcagtttttttttttttttggtatttttagtacagatggggtttcaccatcttggtcagtctggtcttgaactcctgaccttgtgatctggctaccttggcctcccaaagtgttgggattacaggcatgagccaccgtgcctggcctgcatggtgttttaatgtaatttgatgtaattgttactaattttctcattttgaaattttcaaggatttctcaaaaggaaagaaagagcacaagcttattttcccctctcccctctatccaagtatatcatgccttccttctttaaatttgtattttaaatatgaatttaaaataaggggcttggttctgcctgttgtcagaagttaccttagaattatttattctgcccaataaataattgctgggaccaggcgcagtggctcatgcctgtgatcccagtgctttgggaggccaaggtgggcagatcacttgaagtcagtagttcaagaccagtctggccaacatggtaaaaccccgcctctactaaaaatacaaaaattagctgggcatggtggtatgcgcctgtaatcccagctactcaggaggccgaggcaggagaatcgcttgaacctgggtggcagaggttgcagtgagccaagatcgcaccattgcactccagcctggatgacagagcgacactccatctcaaaaaaaaaaaaaaaaaaaaaaaaaaaaaattactgggttggacctgatggctagatcagtgggtgagatttctttgtctttgcgctgtcttctcaaatcattgcctgtgggaagaagtcacaagataaaaaactaagtctgtttacctggagaagcattttttaaaagaatgagcttgagcccaagtcattctgtaacaaattaaatcttaattatgttttgagtcttgttctgagaacccaagggttaagtcaaaaaattattttacttgtatctaattataaaagtaatctatgatttaaaaaaaagacgactttttaaaacagactgttgtaggttcacagcaaaaattaagtggaatgtacacagttcccatatactccctgccccctgcccctgctgccccctgcagccttccccactatcatcatcccaatcatctgtggatttttaatagaaaattgtaaaacacaggaaggaataaaaaatgaaataaaaataatccaaatctaccatgcagggataacatagtcctattgtgttgaatttcctttcctcttttttttttgagacggatttttgctcttgttgccaaggctggattgcaatggcatgatctcggctcactgcaacctccaactcctgggttcaagtgattctcttgcctcagcttcccaagtagctggaattacaggcatgcaccaccacacccggctagtttttttttttttttttttttttgtatttttaatagagatggagtttcaccatgttggtcaggctggtctcgaactcctgacttcaagtgatccacctgccttggcctcccaaagtgctgggattacaggcatgagccaccacgcccagcctcctttcctctttcttttctgtacataagcattctttatcaaactgggatcaaaatatatttcattttcttttcatgtagtatcaaatgttgactgcctgtgtttccaaatgttcttcaaaaacatggtttttaatggaatcatataatgcaccacactttatttaacgctttggcggcaagagtttgatttgtgtctcctctcattgattgcagatggacgtgggcaccatttacagagagccccgtgagttctcaccactttggccgtatccttgcattttggttctggaggctgattggggacactcatttggggtcctcactgtccctcctgggggttttagaatctagaggaagggtttgatcttgggagagaaagcaggtcattcatcctccatgtgagacaggccctcgggagggtgtaacactcacctgtgtctccgttggcccattcagggaggctagatctgaaaggccccattactggacactgggctcacggcagacagggacaggtcatttgggtgacaagccaggatttctcctcaccctggtttccattctgatctggtcacttcctgaaggggaggaaaatgccttgggtttggctctgccagcctcttacaggcgtttctgttaatatttctgactctgaccacatgaacactcaaagtaccttttgattctagaatctgagtcctgagctcatggcccagcggatgagtcctttacctcccctgtgcagtccatcctgggttcccggatgtggccacagcctggggtcttctgattctgggatcaccagaggatgttgtctctcttagggcacgcctatctcaggaagtggctgctgctctcagaccctgatgacttctctgctggggccagaggctacctgaaaacaagcctttgtgtgctggggcctggggacgaagcgcctgtgagtacatttccctgggtcttccttacggtcccccacgcggcacttggttgcggaggcaccaaaccacaaacaaaaactctatttttttttctgatttaaactaatatgtggtaattaatgagaaatgtggaacatgtagaaaggtgttaataaaaaatgaatgctctgggtgcaaggtattaataaaaaatgaatcactcataatcctaccactccgagagagctattattgtctcattgcacatccctctggaaggatatatgcacatattttctttttgcaacagtgagattattctatatatattatattgtgacttgaatttcatggcctaagaatgtatcatgctcatctccacatgtcagtaagtaaagttataagttggaggtggtaagaatgagaaaaatgttgagagcaggagaggtatctgcatctttctatgtttgagaagaggagaaaaggtttggaatcatctttgtgggagaggagtgaggggttagatttaatgaaaggatttctgtacaaacaccagagcacccactctgggttggacgctttgtttgtagtggagccacttgcctcatggtgctcagcagcgcagaagcagaagagaggcaggtgggtggtggacgtgttgggtgagggcaagccaggagtgctgaaggtcaggggtgaggtgaaggtcaggggtgaggtacctgaatatggctgatggctttgtgcagggagggagaggaggacagggcccctggggtctcctgccatgcctcgtgtctcccccatcctcaccacacactggctccttggccacctggacgtgctgcttggatgaatgtgggtttctacttctccacttagctgggccccgggtgctgtccgcctcttcctttacctgggtatagtttactccttatctaattctcctcatctccttactccttatctctcctggctgttcccagactttcttccctttcctaagctccaacctcagcttcccttggagaggcagagctgcacagcgatgagtggtgagagctctgggagctcctgtggtcctcaacttgccccccatcttcatccaccttccctcccttcctccgcccctcccgctgcattatcccaccacctccttggccatgacttcacatcctccactgtcttctttagcctcctctttctggtctcttctcacacttgtctcctctgcctccttctccatgatctgtaccaggctcaagatttccccatcctaaaacaccccttccttgacccatttctccccacccctcctctccactactattttctctctctcctactgctggtcatcaccaacttttgaaagggtgcactgcatccccctttttccactccattgccagctgctcattccttctcctcttcagtaggaatcccaccacctcccctccctgaagccactggtgtaagggtcactcattaccatagcttaggagctctcctctgttgttagactgcaccactgctccatagcgttcgattctggagcccacgccttatttgaaactgtctcctcccttagtattcatgactctccttgctccttttccagtgggttcttcaaattcgatgttgcagttcagtccctgttcccttgctgtgtcctgcccgtcactgttgaggagtccgtctctttcagacaccacctgagacttgtaaattgctcttctccagcctggatcttctgagctctggacgctcagtttcagttgccttgtcatcaggccacattaacatgtcccttaggcccctctaacttattatagtaaatctaacttattatagcaaagcctgtatcatttgctgcccactccccacacctgttccccatcccgtattaggtgacatcttaggaaattgcatgattatccacttagtcccccaaaccagaggccagagtttcattctttacccctcaatccccatgcaagcagttggccagtcttgttggtggaaaacctcagtgtacgcctcttctttttcccatcccaagacaggagtttgaggtccagctcccactctctctcacttgggtctctttgtgaattacaatataggttcagctggtgtaacaaagatgccccaaataataggcattaaggaggacagaggtttatttctctctcatgaatgccacagtccagaattggcacagtgcttcggcaatgatcagagacccaggctcctggtcttttctccactgtgatcatcatgcagcctccgtcacatggcccaagatggttgctccagttcccatcaccatgtctgtattccagccagggaaatgggagtaaaggacaatggaggccacatctcttccttcaaaggcatgatccagaagttgtacacatttatgcttaggtcccattgacaagaacttagtcacatggccacatctaactacgagggagcctgggaaataaagtccatcctaatgctgtccagctaaaaattgagggtttgttaggggaggcagaaaagactggatttgggggaacaactagcagtctctgccatccatcctaagtgtcctctgaggtctcctaacttcttacgttatacttcacctatccccaccttatcaccagtcatctttttttttttttttttttttgagaaagaatcttgctctgtcacccaggctggagtgccatggtgcaatctcggctcactgcaacctccgcctcccgagttcaagtgattctcctgcctcagcctcctgagtagctgggattacaagcgtgcgccaccatatccagctaatttttgtatttttagtagagacggggtttcaccatgttggtcaggctggtctcaaactcctgaccttgtgatccactcgcctcggcctcccaaagtgctgaaattacaggcgtgagccactgcgcctggccgccagtcatcacttttaaacccaggtagaatcacgcgtgtctcctcttacaaaacctccagtgacttcccactgcttttaggatagagtccaagatccttagcatgacattcaaggcccttgacatttgccctcagcctagtttcccaatcccacttgctgttatgtatcttcatgggccccgtctgtggccacaccagatgatgtgactctttccagaatgctcttccatccctctctagccttttcccctgctggaatgccttccctctctttgcctaccaagagccaatttgttcttccagacccagttcagatgctacttcctccctgaagcttgcctcgtcttccaggaaaatgtattggtctttcctttgggccaccacccagccctttggtagtctaatcagtttatgtgtctgtcttcatcactgagattcagtttcttgatgatggggacaatatagcaaatgtgatatcttttatctcccctcttgcctagtacggcaggtcttgtacacagtaggtgctcagtcagtgcttattgtctaggggaatagacatttttatggatgcctgaaagatgattgttttcttctgatatgagctgaggagaataaacgcagaacacatccctttgggcatgctgtgatatgggcattctgggattgagggttttgcagcaaggatcctgaagcaggtttctacgtgtcaagtgtgactgagtgagaaatggggtgaggctagtccaggcaactgtccaaggagttggctgctgggcacagcctgaccttgctattctcctgtcccttcgctgctcgctagcccaagagcagccaccagatcttttgtctgttcctccagctgccgacttccccatgtgcaagggcctctgcatgagttgcctcctcgtctggatgcctccacctgttgctcatcatccaggtctcaagctgggaagcatttctgaccccacctcagtatagttacaagcccccttgctctgtgctctccaagcacgtgggttctgcttccagcctgtgttacacctcagctttcttatctgtaaagtgggggcattctaggtcttacacccagagcaacatctgtgggcaagcagcgtgggcatcacttggacactttttgaaatgcagaatcttgggccccaccccacacctgctgaactagaacctgcattttaattggaatgcacagcagtggtctagaagacattgattctcagcctctgttgctagttggaatcatctgggaagctttacaagccactgctgcatgggtactctctcccagaaattctgttttaattggtctagggtgtgacctgggtttcccaggtgagtcttttcttttccttttttgtttttgagatggtgggggcggggggcggtctcactttgttgcccaggctggagtgcagtggtgcaatcttggctcactgcaacctctgcttcccaggttcaagcaattctcccatctcagcctctgagtagctgggactacaggtgcatgccaccatgcctggctaatttttgtattatttggtagagacagggtttccccatgttagcgagctggtcttgaactcctgacctcaggtgatccgcctgcctcggcctcccagagtgctaggattacaggtgcgagccacggcgcccaggcttccccaggtgtttctaatgtgccgccaagtttgagacccattcaagggaggggtgctatgaggattaaatgagagagtgcatacacatcaatgcatgtgggatgtgatttttgttattactgttccaaccacaagacacagtacatgttattggattcgtttgctgaaagtgttttccctgcatgatagtcagctccatgggaacagggtgcttattcatgtcatccccttattcattgccatatcccctgcccttcagcaccatacagacacctagtactcactcagtagctaatggctgggtgaatgaacacctgcatgttattaaagacagagtggccagcttagacctcagttactactgtactatgttttaaccgggaggtgggggagagcgggaaggagactgaggttggtggaatgcttgctgtgtgccacgtgcatttacatcattactggagatgttcctcgcacagtcctggaaggtcagtatcatggtctctgctgtactcaagaggaagctgaggctcaggtgaaggaccttgcccgagaccacgcggtagtaagtgtcggagcgcagtctgccttactgcagaatgcagcatttatgtggcgaagctggaactcttagaaaaggaaagtaaaaccctgtgctcaggagcgcatgaaggaatcgtatttggttttctttgtagctggagagaaaagacccctctgaagacaaggaggacattgaaagcaacctgctccggcccacaggcgtagccctgcgaggagcccacttctgcctgaaggtcttccgggccgaggacttgccgcagagtgcgtggggcgcgcccttgggtgggaggtctgcaggaggctggaggcgcagggctggtgggggtgggcgatggcgggcggggtcagctccctgggggaaggagaggcgtctaggaaaacaatcagaatttaacgaaaagtaatcagtgctggtggagttacaaagattcaagaactcttgagagtaatagctgcctctcagctccattccaatgtcctctgggcctggtctggcaatatttggccactctgtggacccattttcttagttctcattgagaagtcagcaccatctggactctattctggccttagggctggctctcactgattttccctccctctgtgaggaagcccgtcctgctagtggcagagctgggctggggagcagttgctctaatgttggaagggtttgcatgaaggactcctgggccccactgtcttcacagatgaaggacacagatccacaaggtgacccaccatcctagcttgcctgagactgtcctggttttagcactgaaagtgcctgttccaggaaaccctgcagtctccagcaaactgggacagtgggcacccgacttgcaaccatctcttcctcccaggaaggccaatgtggccactgcctggtttctcacagtggttggcccgatactagacccatctgtgtgtttagtaaatgctggggagttataccgaatattctagagctctggttatcaacctgggctgatagtagaattccctgggaagattcaaaacggtccaaatgccggggccccacctccagcgttttagattgactcgagttagggcagggctcagcattggtagggtttaaaggctccccaggttgttctgtggtgaggccccgctgtgagccactattttaaagcatgcattaacacaaccaagccactgtccacagcagagtcagtgagaaggtttgcaacttgggtccctggttacaacttttccataaaggtaactatttgagagtttctgcttcggctgctgacgtcaagaaatgaaatgtacaagcttacttagatcaaatcctgaagaaagcctgtaaataagtaatgggtattaattcagtactaaaacacatgcttaaaaatattctgcacttattgattgcaactagaagtgaggctggtgaacttcaagaggggcatggggaaatagaaatgtttgcttttcttaaggtgaaagagctttgtgttgaattccctgcaacgttgtttgaaaaaaacaaaatagatgggcaaacagatcataaatgtttgctaattgttgttgccttttgtattcatgtagttattagctagcgtataatctttatccccctccacttacttacccactcatatgtctgtaaacataacatgctttatacacatatgtatgtgtatacacataaacatatctatctatctgtatctacatatataaataatctggctgattcaaaaaataatggtttggggcagcatagattaaaaactcttaaaaaaaaaacaacagaattgacttcttggttaacctcaggtaaatcgctgcgctaatagatttaaaggaaaatgtcaaccaggcaccaataatgggatattgttataacaactgccagtccttttctgagtacttactgcccttagtgatgtagatttctaattagtcaggcaggtagatttgatctgaaaggctttgaatgcagggtggggacagtgaactgagctgtttgggactggtgacaaagtggcccggagctctcaggagttgctgctctgagacagtcctccttctggggagcccctgggctgagtccctgtgtgaaggggccaaagcttcttgctcaggtagtcccaggactgcctggagacagatgggggacagtcagggttttagaggagagacagcaggcaggcagtgactggtgtgtccctcttcccagtggacgatgccgtgatggacaacgtgaaacagatctttggcttcgagagtaacaagaagaacttggtggacccctttgtggaggtcagctttgcggggaaaatggtaaggagcaagggagcaggagggttctctcgggaggggactttctggtgccctgtggactgtgccgggtgagagcaagacagagtgagatgcccccaccagaggtgtgtgcacaaggagtggctgatcctggtgcgtggtgagacacccacataggcccagctctcagggactgccccgcacacgaatgtggacaggtctgcctgggggtgtcccagacagacacatagatgtggatggcccaggagaggacgttggatggtggatagtagaggaacatttgggggaaaatggagcaatagcatggaaaccagacatgaaggcataaagatagagaaactatattttaaagatgtgggagaaaaacataatggttatttaaaaaatgttgtgggggtagttgggcagagaaaggcccctctggtgggcaccctagcctcttccttgcagcccaccttcctgccctgaggcgggactgtggctccagtccctgctgacttctgtcccagcccttctctccacacaggctgcccaccccccagtgtctgtgcaccccccacaggctttcctggcagccccagccctcccaggcttcagccatcacctctctgcagagaactccgtagctctccgaaccctcccttcaaccccaggcctctctgtgcctctaaacagttccgcctgctgcccctctgagccctggagggagtcattttctctgcacaaactgccccatatccaaaagcctctgtcttaaccaggtacaaccatcaaaggcagaaaatgtggacctgccttgattcttccttcttttttctctctccacatcccacatgctatctctagcttttgactttaaacttgtccccagggcccatccctacctcgtgcccccacagccactgctagctctttccaggagcattcccttgtctctcaactcatggcattgaatttttgaacagcccaggccatttgtccaagtactggatttgttcgattgtttccttctgttgtttaacttgtttctctgactcctctctttcctgtaaactggaagttaggtctagagactccattagattcagatgaagtatttcggcaagaactcagagtagttgatgttctgcatgtcatatggcatcacaacagagagccataatgtcaggttgtcccatcattagggatgatcgcctgatcacacagttaaaatggtgcctccagacagctcccttataaatcttcccactttgtaattagcaagtaaactgtgggtgatatcttggcactgtacggatgtcctacttctcagctacctcttatctaatggtctaagcatccattgaccttcctgtctgaagaagtcatttagttgggactgcaaagtggtgattttctcattatcattctttttctcttgattagccaacatttttttctgtaaagaagagctttctccctccgcttcgttgagtattagtatggacctcaatactttttatttctaatgttaaatcagtcattattgtgttgatgtatgaattatactgaaggtggccatcaggagcccctttgagctgggctctctctcctcagagactagcacagggtcccagtgaaaatgtacacggggatgtaatgcagattttaaactcgttcatgtggaggtgtaaatgcttactgcagatcctcacctgagtgcaggttttggtgtagactcagggtccaggtcttacgccctgcgcctggcatcaggaggaatggggacagctgcttgaaggtaggaaggaaacaggaagctgcggctgtacgtttttgtgggacactagctccaaggactaggattaattcttccacttgacacttgggggaattcacgtcctgagattgttcttatttcgcattcccaacatggaaggtatttcgatggtggctagaaccaagaccgacatgccttcacattcattggaactaagcctcagagctccggggctccgggctgctcctgggtccctgccagcatctttgatctccctgggtcttctgttctgagatgcccttggctggccctggggatttctttaggaaggtaccagtgtctagggggaggtgaaaggacaaaggcagccaaggcaaggcactgtatacagtagattggcatctgggctcatgcaagaagctgcgcctcccatttttcctctagaaggaggtggagggagttgaagaatgaccttatggtgaaggaggcagctggaatgctccgtcttgaaagtttcaacctggccagcctcctcggtggaccccaggcctttgcgtcctctctgccctaagccacctccttgtggcgtccccgcttctgctgctcttatggcgtgtctcattctgcctgtccctctcttttagcctgcttgcatgtcccttttctctctttacaccctaagctgaagagccctgaggttacattctgtgtacccacccaccccagctggccttctttgcatttccccttatggacacctggtggcagtattatccaagatgtgaaccatacttgatttggccaagttcctaagaagataggagtgtgggagagtgtgtgcgactgtgcacttcatggtatggaagaaagaaaaggtcctgccctacttgtagggcaggacaggaagatttaaaacaacttttttttttctgaattcaagaataaaacccattaattgcaaaaaattgaaaaaaatcagagacaaggaaaacaacaaaaactcccactgcaccatattctgtaccctgcaccaccctggagagaattactgataacattggtttgtattacctaccctgttacctcccctcttcccacttgctgggaaaaaatcatgaaaatattgattttccttattcaaggattctgtatttgccaatttgcctactcactaaaatgtatttgcaagcccaaaatcaacactcatggcactttagtgatgatttgtggacactttcagggctttgaaaaatttgagtctcccagcgtgtatgttggttgctgaggttgaacaaggtgactctctgcctccccgctccaactctcatggagtaaacatgacatgtccatgatcaaaggacatgtatttactccacgagagttgaaacagggaggcagagagtctcaaaacatggtactgcacaggacacgtatcaaaggacacagacaaaatgtgtgtcctttgatatgtgtcctgtgtagtctcatgtttttcacatttttgtgccttttcttggcgacttcgctgtttaaaatggccccaaatgtcgtgctgaagtgctgtctggcgttcctcagctcagaaaggctgtgatgtgttttatggaggaagtgcgtgtgataggtaagcttctggcaggcttgagtcacagtgccgttggctgtgagttcaatgctgatgactcagcaatgtatattaaaaagtaaggtgtccttcaacagaagcacacataaaccaaggttacgtattgatcagttgacaaaaacattgtgacagaggctgccaggaatttaaccctgcttcttctctgaggtaatgagtcagcattcactaattcagggttcatggtgaccttatagatcataactaccatgaataatgagaatcaactatatacatgcagtttggtaaactgcttgtgttgtctcatcttttcttaggttattaaagagtcattgaaatgattttttttgatggctgcataatattctgtcagatgagtataccataacatttgacctattttttggacatatataattcaaattttcctcttttataaacaacattgtgacaaacatcagcatacaggaatctttgtccacactctgattgcttttctgtagggaagtttctagaattggggctgttaagccagggggcttatttttaagtatttgatacagatggacaaatagccttccagagagagtgtactaataatactccattgggtagtgaaggaaggtaaagaaaaaaggtaaagcaagaaaaaaagagaagcagaggaagaggaagaagcagcatggtgtggccctggctgagtgcctgtgggtggaacaggatgggggaaggctggcagggatctctggggccacaggcagtgctggctggggtgtggcagatggaccagctgctgttcaagcccccagacccacatcctggtgaaggtagccaggttgaagtgtttgcgatggaggagggccagatgcctggggcaggggctgaagtagcccgtgtgcatcctatgtgtgtgttggggcagcctgtgccttcttattccagggacctggggcacagagttggcagagctgctcagctgggtcttgttaaagtatcttattttaaaattttgtttatctaatttttgaattaggtagtacatttattctatctatctatctatctatctatctatctatctatctatctatctatcatgaaaaatctccctcttgctctgtaccccatccaacaatcaatccatttcttccttttcaaagaaaaccactgcaattagtttcttttatattattctggttttgtgatgcacgtgtaagcaaatatgactacagattctttcttcatttttttttgagatggagtctcactcagtagcccaggctggagtgcagtggtgcaatctccgctcattgcagcctctgcctcctggattcaggcaattctgatgccttggtctcctgagtagctggtactataggcatgtgacaccacttccagctaacttttgtatttttagtagagacagggctttgccacattatccaggcttgtcttgaactcctgacctcaagtgacccacctgccttgggctcccaaagtgctgggattaaggcatgagccaccgtgcccagccgactatagatttttgtcttttaccttttagcacaaatggctgcacatcacaccactctgcgccttgcttttttcacttaatcatataacttggagatggtttcacgtcactacctagaggcatcctcattctgtttgacagctgcctagtactccattgtacggacggaccatacttcatttaacctgctttccattggtggacacatgggttgttccaaatccttgctagttcaagccatgctgcagtgaatagcctcacacatatgtcattcctcacatgtgcaagtatttctgtaggatgggtgtctagaggtaggattcatagggcagtgggaacatgcatttgaaactacaatacatagtggccaattgtcctctgaaggggtcaaactattttgttttcccaccagcaaaacatgagcatgcagttttcccatagccttgccaacagtggtctatcagactttagagatttttatgaatctgatgggtgaggaatggtattttgttggttttctttgtgtttctttctgagtgggatgaagcatctttttatatgtctcaaggccttgcgtcttcattctgtgaactgtctcttccactctttgctctttcttccactggattggatcgttggtctctcttctttccttactcctctctttgctaactaacacaagggccaaatcctggcactcagccccacacccagccctgtgtggcctttgtctggggctctttttacagggaggagggggaaggtgggggcaggggccagcactgggtggaccaggaatggagacatcatcctcacccctggggacctgaagtctctgatttaagtcagatgctcattaaatgagataatgcacatgaaatgcctagcacaatgcagggcttatcatagtaaatgctctgaaaaggctgctcattattttcatgtgtagaacatggaaatctaccaggatctgtgtatctgaaactgagtctttacctgctgcccccgtgtgtgggtataggatccctggggctggctaaggggcctggtgttccttatggactccaaggccagggctggcctgtgagctgctggtttggatctggtttccactcctgtgaggtttcttgtttgggaaaaacctggtctttaggacagggctggttggaggcagactatggcttatagggtttgtatcttcactgaattttctttcactctctgacctctgtgcatggctcccctctcccatctctgatctcctaggggtcacagtcttcctacatggtggatgatctggggtaatgggcaaaagagccttctgggccataagggcctctgggaaagctggtctggactggactcagggcccccacatttagggtcatggccataatgggaggtatggagagggattttcagccagaggtgtgagttaagggtagaagggctgtggcattcagacagcccaccccacccttacccactccccagctctgggtctgaccttccattgagctttgtctctgcaaagattccctgtgtatgaaccccctgcactaggccccaaccccagggtcttacacccagccctaagggcagccagcatggcagagaatggtcactggctggcatgtggccccgggggagcccagagtccccatggagcttgatcaacttgtcccctccctgtgtcttctagctgtgcagcaagatcttggagaagacggccaaccctcagtggaaccagaacatcacactgcctgccatggtgagcctcctgcccccagcaaacccaaggaggcccctggggctctgggcttcgggaggtccagggctcctgcctccccagcatcctgccagtatcccagacttcagctcggggtagggaggggctgttctatcttcaaaaggactcttctcccaacacgcctctattccttcctcagtttccctccatgtgcgaaaaaatgaggattcgtatcatagactggtgagttctgagtcttggagtctttagggcgggctgtcctgagggggcgctgggtccctcagtttcattcggctcagtgactggtagtaagagtgtgagggagaagtttcaggtgaggtaatgtccccttggggtagccagggatggagagggtgtgggcagttcctcggaagcttactcacacctgcttgttgggaggtaggcagataaggaggaatcatctctgagggcagaaggagctgggaaggcttcctggaggaggtggggcaggtgatggcccggcaggaggggtggggttttgctaagctcaccatgaggacattccagtgaggagaggctcacaaactaagggaagggtctgaaaagagcagagcttcagggaggatgggctgcggtgctgccctgggttggtgggatgaaaaagtagggtccccaggctggaggagccgaccagattgcctgagcaggggacaccacggcagctgtgcagcaggtgaggacagcagctcacgggcgtcttagaaagaccacagcatctaatacttgttgagcacctactatacaccaaaccttgttcccagcaagcacttgacacgagtcatctcatctgaccatcaactcaccgacatcagttcacagatgagaaggcaggttgggaaagactgagtgacctgcccgagctgacagctagctggaaagtagctgaggccaggcttgaacccaagcctgctgtttccaaagcctgcgttcctaaccactagtccatgccacctcctgctagttgaggggagctgtctcttacacttgaggggaatattcggggtccacacgtgtgatctcagggcattgggcttcccaaaaagagagagttgtcctttctttgcccccaagaagtcttggctttgtggttccccagcgtgttctcctctggtctcatgcccatgacacccccaaccaggaggataatgagagactagggaaaaacccccaggccacagagccattaagctgtgtgccagttccccaggcctaaagaaaacagcttgtgagaattagaggagaggaaagagagccgccaggagggcctgtgagggagaggccgcaagggcagcgaccacgggtatgtactgtggggaagcggtttggaggaaagatgtgctttacatcccagaatgatctcttcatctccgctctccatgtgtgccgctctgactgcgggcgatgagctgtgcgtgtctctgcgtgtttgcgcatgtggatgtgagtgggtgcggttgtctcctgtgttgtggatgtgtctggcccgagtccgggtgagctgtgtcaaaggcatcggcgtactgtacaatccaaacacattacagaatctggtggttgcatctctggtttgggttgaagtggcatttttattgtgagtctattttcagacttgctgtattttccaaaagcaaccccaagccccaaaacccagctcttggccagaaagcattctgctgcttcaagttcctatccagaagagtgctttcttcccagaaaatgcagataagctcttgttattacctgaatcctggaaataggatatagtccatatggccttttctctgtaacttaatcttccatttaattcttcagaaattcctttttcattaaaaaaccaaaccaaacaacaacaacaaaaaaaccccaaaccaccccctacctccataaaacagaacctctctcctcccactctccttccctcctctcccaattcagagaagactggaggtcagaaatccaattccttttcaagtgctgaccttttctagggtttggtcatgaagactgggtacaaatgccattaactgtcactcatctggtgctgagaatatcactgtaaaatattgcaggaaatttttactttctagttttgtttttttttttttttttttttttgcggggggcgtggtgggaggatggagtttcgctcttgtcacccaggctggagtccaatggcgtgatcttggctcatgcaacctctgcctcccaggttcaagcgattctcctgcctcagcctcccgagtagcagggattacaggcacacaccaccacccctggctaatttttgtatttttagtagaaacggggcttcatcatgttggccaggctggtcttgaactcctgatctcaggtgatccatctgccttggcctcccaaagtgctgggattatgggcgtgagccaccgcaccctgcttttcagttcttattaatatcatttacttggaaaaatgatacagatctgtctgtgctgacaattcattcttcctaatgtagtgccggcgatggaaaactttaaaaatcaaagcttaatcacctccctgggaaatacaaagaggaagaaaggagcacagaaattgtgcagagattagggtaccttgtagggttaggatttcaaagaaaaattgaagcaccatgccagggtatgcctttcacaatggggctgggatgtgtcatctgaagctgcccatggctaaggcactcacaacagggagagggggtctacggggcaccaagaagaaggggaaattacccaggaggaacttcctgaaggagatgggtcctgcccagcccagtgtttctcagtgtctgcatcattggcatttggggctggaatattctttgctgtggggttctcgacctagtggttttgaccgcaggtctagcctacccgggaagcagcaggtggctgcaatcaaagctctggtctccacgtcagcatatctggcctcaaatcccagctttgccatcttggcaaattatttaaccttctcaaccttggctttctcatctgaacttggggctaattgtagtacctacctggtagtgccgatgtgagaatgagtgagttaagtcacctgatggttttagcacagtgcttggctcttagtacgtgctcaataaatgttagctgttactgtttattattatcaaaggaggcaggagtggggttcagagggagggtctgcataggatgtggttggctaataggtgaatcaagcagttaacctccttgagctcctggccacagtcccctaccctggttggggagccaagaagtgtccccctggaagcaggccctatgccatgcaggagcaatgttccaggagtcaggacgccagggcttccggcctgggcttgcccttcctctcctgatgaccttgggcaagtacctacatggctttaagcctcagtttcctcatgggtgcaacagagataataataaaagtgcttgtttctcaaggctgtgtgagcctcctgtgtgataaaggctaaaagtgccccattacatacaaagtcagatacaaaaaggaatcgtgtattaccattggctacttcaagactgtggccttggagatagtttcttcctggtcacctagttttctccttgatctggacatttctttagctcctggagcctctcagttcttcctgggtccgggaacctggctccctgaacaggccagtccctggccctgcctccttgcctctggcctcctccctgtcagcctgcagatgcgtctgtagagatccaggctggcagcctgggtttggttgcctgatgggatgctggtggttggcgagatgaactagttccctctcagagagtcttgggcaaacctcctgtgcagtgtcttcatctctgggattaccaggcctcagtaacataccaaagtgaagaccagaagcgctctctgcctgccccccgcccccctgtgatgtgtaaccgaggccgcatacttcctgggtgggctgtggcctgcagttcctttcctgtgttcaggccctctctgctcccttgctctagggaccgcctgactcacaatgacatcgtggctaccacctacctgagtatgtcgaaaatctctgcccctggaggagaaatagaaggtatgttccctcttcgttctgccctttgaccccctgtgctctcccccgtaccccctctatccagcttacacttctagttttgagagtttgcagaaaaggggagattataaggcctctgttgcccattttccactgagaagagctctggcaatgaaagagatgtcttacagacacttagggttctccacacttggattgtgggatatgccactgaagggcacaaagaggataattcactcctgcagagaatattggctggctgtggccatgccatccatcaggtcctgccttggccgactgtgctctagcagtttcaaaagctattgaaatagctcttactgttctattaaaaaagcaactcatcatcattttgtaaaattttaagtaaagaaataatctgaaagaatataaaatttacctgaaattacccataagcccacccctccggacaagaactattagcactccgagacctttctgtatgtatgtatatatgtatgtatatgtctgtacatgcatggaagatgtgtgtatttaatacatgggtatgtgtatatatacattagaacaaattgttttgaaaattgctttttgatacttgacaatacaacatagatatcttttcctgttattaaaagttcttctataatacaattttaagtgaatacacatattccattatgtgaatgtatcatgatccacgttaactagttaatgatgaacatgtaggtgttttcaaatttttccacattataagcaactaaattggcaaggaatatttctgtagctgaatctttatataattcatgagtttccttttggataaatacctaaaattggaattgctgtgtgaaaagatttcaactttttttttctttttttttttttttgagatggagtcttgccctgttgccaggctgcagtgtagtggcccaaactcagctcactgcaatctccgcctccccagttcaagcaattctcctgcctcagcctcccgagcagctgggactacaggcgcgcgccaccacgcccggctaatttttgtatttttagtagagacagggttttaccatgttggccaggctggtctcgaactcctggcctcatgatccgcccacctcggcctcccaaagtgctgggattacaggcatgagtcactgcacccagcctaggatttcaacatttttaagacttttgatatttatcaaaattgcccttcaaaaaggctggactactttatgctctcatcatgcccctaggcttattttgctataccctccccaacacagggtaaaataataatattaaaaaagaactttgttaattttataggtcaaaatagtatttcattgttgccttaattttcattttattgatagctggtgaagttgaccgatttcaatttgaatatatttaaataattattttatatttatatataacatgtttatataatttatattcattctattataaatgtcttatttatgttctcagtccatatgaggaaatgtttatctttttctcatacctttgtaggagttctgtatatatatggatattaacttttcccctgtcatttatgtagtaaataattcttgttggctttattttaccaattaatagtttttgacctatagaaatttaaaatttttatgtagccaaatctgttagtcttttccttagggaataaggcagggatctagcattacttttttcaaaattgttctttggtgatacaaacactgtattttgagtaatcttttccctatatttcgaaatgctgcctttatcacctactaaattcctaaatgtgttcttgggcctgttcctctattatcttcaattggtatgtctgcttattatttctttggttttgatatctgggttatgctggctttgtaaaattaattgtaaagatttaaagtcttctctaacatctggaacagtttctataacacaagaatacagtcctttgagggtttgaaataattcacccataaaaccatatgggctgggtgccctttttgagtgggtatagtaatagctctttaaaaacttttcaatttctcctgtgatgattgttatttttagtttgtcacttttactctagtcaattttgataatttatattttcctagaaaagcatccattacgttgaggtataatttatttacatagtgttgtacagagcaaatttttataatttgaataattctctctacctgtggtgttttactttttcttatttctaatgctatgtatttgagtttttttttcttgattagctggttagaagtttattttaaaactttattggacttttaatctttgcactctttaactgtctttagactgattttattgtttccttctttaactttatagcttcttgtctttatttttaaaatttcttatttaaataatgaaagtatggtttctgccttctgtgtcatgctcaaaccctaaggttcagcagaccctaaggttatatttaactctattaatttttttttaacatttaaacatttgatctattttgaatttatttttgtgtgttttctgacagcagtctgatgtgattctttcatagttagtctatttttttttcctgactagatgctgctcataggaatttatcttttttcttatagtttagaaaattattttaatctatcttggtacaggacactttccattgaattttgtctgagacatgatgaattcttaaatccgagttgaggattgttttttaaaaattctgacattatgccatggacagctgaaggcagagtgggggagtggggagagctctagctctccagcccaccaacttgggttcaaatgctcttggctctgcttctttgtaactgagtgagttgctccagtctccgtaaaatggggctcttacaagtcccaaccctcatgaggcggttgtaaaaatcatgaggttataaaagtaaggttcttataatgtctagtacacaataaccttaaagtaacatttgctgtttatcatcattaagatgggctttctatgttgctaatctgatttttttctgtaccaattctgccttttactgcttcgtacatggtttaaaatgggctattgcatttgtagtttcttgtcaagccttctttttttttttttttattgatcattcttgggtgtttctcgcagagggggatttggcagggtcataggacaatagtagagggaaggtcagcagataaacaagtgaacaaaggtctctggttttcctaggcagaggaccctggggccttccgcagtgtttgtgtccctgggtacttgagattagggagtggtgatgactcttatggagcatgctgccttcaagcatctgtttaacaaagcacatcttgcaccgcccttaatccatttaaccctgagtggacacagcacatgtttcagagagcaccgggttgggggtaaggtcatagatcaacagcatcccaaggcagaagaatttttcttagtacagaacaaaatggagtctcctatgcccacttctctccacacagacacagcaacaatctgatttctccatcttctccccacatttcctccctttctactcgacaaaaccgccatcatcatcatggcccgttcccaatgagctgctgggtacacctcgcagatggggtggcggccgggcagaggggctcctcacttcccagaaggggcggccgggcagaggcgccccctacctcccggacggggcagctggccggacgggggctgccccccacctccctcccggatggggtggctggccgggcgggggctgccccccacctcccggactgggcagctgccgggcggagacgctcctcacttccagacggggcggctgccgggcggaggggctcctcacttcccagacggggtggctgccgggcggaggggctcctcacttctcagatggagtggcccgttagagacgctcctcacctcccagacggggtcgcggccgggcagaggcgctcctcacatcccagacggggcggcagggcagaggcactccccacatctcagatgatgggcagccgggcagagacactcctcacttcctagaggggatggcggccgggaagagacgctcctcacttcccagactgggcagccgggcagaggggctcctcacatcccagacgatgggcggccaggcagagacgctcctcacttcccagacggggtggcggccgggcagaggctgcgatctcggcactttgggaggccaaggcaggcggctgggaggtggaggttgatagcgagccgagatcaagccactgcactccagcctgggcaacattgagcactgagtgaacgagactccatctgcaatcccagcacctcaggaggcggaggctggcagatcactcgcggttaggagctggagaccagcccggccaacacagcgaaaccccatctccaccaaaaaaatacgaaaaccagtcaggcgtggcggcgcgcgcctgcaatcgcaggcactcggcaggctgaggcaggagaatcaggcacggaggttgcagtgagcagagatggcggcagtacagtccagcttcggctcggcatcagagggagaccgtggaaagagagggagagggagaccgtggggagagggagagggagagggagaccgtggggagagggggagggagaaggagagggagagggagagggagacggagagggagagggagacggagagggagagggagagggctcaagccttcttttttccctgtcactccttttatattttcctttacttctttgctcctcgtctgttctctcccggcagttctgctttgttccacaaaaactacatcttcttgtactctactgaggattccaaatcattttctgtaatatgcaggtgaatgctttcctgaatcttatggatgtggtttccatatcctggttggctctctgccctctccctgctttattcactctcccacaagatctgttcagtgttggtatctctcacagatagggtgtgtgggtctttctctgtccatccatctcctcagatctttagctggaggacaggttaacgtgcccagtttctggccgactctacccagtgctcttgaagctggagatcgtctccagattctagatctgtaggagacctctaggagttcttctcctagaagaggagactggaggagataccatttttaaaaatgttctttttttttttttttttgagatggagtcttgctcttttcgcccagcctgtagtgcagtggtgtgatcttggctcactgcaacctctgcctcctgggttcaagcgattctcctgcctcagccttccaaggagccaggattacagttgtctgccaccatacctggctaatattttttatttttagtagagacggggtttcaccatgtgggccaggctggtctcgaactcctgacctgaggtgatccacctgccttggcctcccaaatgttaacatcgtttttaagcaagacattgttaacttagacttctagctgcttgatgtcctcagatccttccgtaaatgtaggcagctatcagaggcatgtacctgacattgtttttcattcacttcattcttttaggagatgcttattgaacatatgccttctgtcaggggctgggcatagagggttgaacaaagtattcttggtctcaccctcagggaacttagagtcctggcaggcgacaaacaaatagacaaataaaaatatgggtataagttgtcttaagtgccctcgaagagaaggacatgcatggtgaaagagaataacagagtaggggagagctgcttctgcctgacagaatcaaggaaggcttctaggaggaggtgtcttaggctgccagaggggaagccaccggcacgtgaggagtaggaaagagttccaggcagaggtgatgacatattccaaggccatgtggcaagaaagaaatgaaaagactggtttggctgagttctctgaaacatttaaagggcaacttttaattatagaaaatttcaagtacacgcaaaggtagagaattgtacagtaaactcccagataccctccctgagcttccacatctagctgctctctgccttctgatttccttgttggaactttggactagtcccagaaacgaccttcctgaaggcactgcgaacttcctcttcctgccccagcccctcccttcctcgctgggggaacaatctgttccgggatgtggccccttcactaattgctgttcagatagtttctaaggagggctgtctcctgcacaggtagagagatttgggggtggtaatgcagacagagggtcacctcacaggtcagtactcttggtatggaaggaacctcgtcttcagttttctgactggcactgtctctcatctctcaatccaggggcagacagtggtgggggcacactgtggcatttctgactgttttccgacagttgtgtttcatgacgctgcagccgtgcctaccaccagccccctgatggagagttaacatcccccgacctgtcttcatttctatgctgtgtgagccctcacctttctctgtgtccgcatgagtgtgttggtgggaaggtaagaaagatgtttatgtggtcactagatggcgctcaggtcacgggcaacccagcatgctgcggaaggcattcaaagtcgggaccaccttccatcacagatggttctggaaagaaatgagaatcttcttgcaaccagctaaccggttttgaacatgcagttaaatagcttgatttaagtggcagtaaaagagttaaacttgtgcatccaactggagctgtccttgatgactctcggactctgccgacccgttcctgcagaggtgggtccctttctggggccagggcctctctccggccttgaggtcgggcccttgccttgctcgggccaagcctccccgacttgcctgcagccccctcagaacgcgtcgctccaactttcctttcagcccttttttatgttgtttctccacgttgtgggcttgtagcccattggggtgatagacaacacttctatttcctcactgctctcaaagaccaaatgaaactgaactgtaaaaacaagttctttctctgtatttccccgcctcagggttcaccagatgatttggttcaactagcagtttttgtttttctgtttttgtttttgtttccagtgagggcaagacctgacactaaccttttaaacacctctgcccacaaatttgcctgggcgcactagagtgttccttggaccctgtgctctgaagtattaagtaagaattttgttttttaaaaaagagtgctttccttagaagctgcaggtcttttgagaggtaacaggcacgtgagctctgtgaaacatacacagattctttgataactttatacataggaaactcatgctccataaatagcacttgtatcctagtgttttccatagttaagaaatccaaagttagtctccttttgtctctggaatgtagatgatgctgatttcccagcagttttcagtttctcctcttgcctggcgcaagcgagagtcaggcagccagccgccatgggcttggggatgtgccgagaggcagagggagctggcggggcagaccgcaggtgatggcctcagcttcttcatgcatgttccggggactgtgtgcagggctgggacttgtggctcactgggctgggaggtcctgctgtctatctccttcagcttcccccaggtgaggcagctgggcttcgttgctcgggccacagaactgggagcattcatctgtgttttgggcttccacagccccagcttcctgggctgagggaaaacacaataaaacacttgtgttttggcagaacggtgatgtggactaaatagaggctttgtcttgggtggcttcactggtcactgtgctcttgaactgtctgcagacacaggggcgagagcccgggatggaccttcacacccagagactgcgatccgcccccaagtcaggagtcattgacctaagacaccaacagggctgtgtcttattacacattcccagtgcctcctcctgcacctggttaggcttgctgaatgaacaaatgaatgaaagaatgggtgaattaggttgggtgctgtggctcacacctgtaatcccagcactttgggaggctgaggtgggtggatcacctgagttcaggagttcgagaccagcctggctaacatggtgaaaccccatctccactaaaaatacaagaaataggtggtggtgggcacctggaatcatagctacttgggaggctgaggcagaattgctggaacctgggaggcggaggttgcagtgagccgagattgggccactgtgctccagtgtgggcaacaagagcaagacactgtctcaataaataaataaataaaaagaaagaaagaatgggtgaattaatgaaaaggtgtggttgcgaggcaggctgcttcgcagccacccacttgatcctctgagccaccagagccatgtgttggtcagatggccgatgggattagggggacatctgcatctgggctggacaccagtctgcagccagaattcaaaatcagtctgggtgggaagccgactttgcctctgtaagaagcacatgggggttggaactgtgaccttggcctcattagcccgagataacgggccaggcctgttagtaatcatttagaaggagcttaaaatgtgatctgtttgcttccggtggtccctggccactgctctcctcgggcctgcagctgtgtctgtgttggccctctcgctgttgcagaaaactccccatgagcagagccctggctcgcccacagaaggaaacctcttgctttggagatgaaggtgaccatgaactatgatttttgcagccctggtgtctgctggctggcattcatagctgaggcctcgctgaggagggctgaggggctgggccgggccctccttgctgtctttgccctgtcctcactctggatggccacgctcccttctctcttctccactctttctgtgtctttgtgcattcttccttcacaaagttttcctcaacccttgacttctgactgcagtcacagagctaggggcaaaacgagtgttttctggaggacagcaacaggtaaaggtgaacaaggaagggaagtaatcagcaagttcaccaaccacatcccgggtgtgcacgtgacctcagactgcgttacactttactgttggagaaggagaatgggaagatcagatttgggaagaggcagaaatcagagaggacagtggaggaagactgaggggtgtccgtttccttggcgcatcgcatacctgcctagcagtgagggacagattcagagtccatacatgtgccagagcatttccttccgtgcttttcttatttctagacattccttaccaacattcaggggcacacccaagtgtgtagcgtgttcagcttgtggacagtgtctggctctgtgattccctggaagcggcctgtgtcagaagccagatgccagtgcctgctgttgtgaaaacgcaacgtggagccttcaggggggtgatcctggacacggccactaggtggagatgttgtgccttgaaatgtccctgctcggcgcgcctggtcccaagcacgacctgcctgcgggcttggagtgtggggtgtgccttgctgcctagctctggcccttttgtgtctccccaccctcccgttgtgtctgtactttgttcccctcacttatctggctatcatatggaaaagcacattttcttttctgaattattccttgagtgtattgaatcaagtttcgggtctggttttcaactggcaaacggaacacacagagtgatgggcaggccaggtgggacccccagggctcatggggtgttgggggctgcgtctggaggggccgtgatgatttagtttatgataaattcacagctgggcagagggtggggcctcgggccacatctgtttcacacccgggagctgtctttccatctgtctgcctgccagctctccatccacagcctgttcatgtaacccgtccttctcccagccatgcccaccctaaccccttttccatttctttacgcttcagaggagcctgcaggtgctgtcaagccttcgaaagcctcagactgtacgttgctgtcaccttggggacaaccaggggagtggggccttgggttttggctagaggggcgagggtgctggaggcatggggtttttgatttgcctgaggtgggattgagattcccccacaaaggtaagtccctggacttacctttgctgtcacctctcggcctctgtggagcatgtaaatcatctggaatgctttaaggggcaatttcctcccacttcccccaacccttcctaaatgggataggcttgggctgatgctcgagttagaccactctgtctggtagtgaggggtaggggcaggcatgggggtctggagtggggcagggggagtgtgaggtgtttcaggggccaggaggaggccaagaggagttaaaaactcttggagttgaaatccccaaggtaaatcataattgagatgattaacgcaaataattagtaatgctcctgttagcccacctacctgggcctcccacctctcctgaaggccagtgccctgtctgtgctggggtctaggagacagaaggtgttgaaggaggtggggaggcccctggctgagaggggaggtgaggctccagccttctggtccctccctgtcctggccccttcctcatccctagggtctgggcaggggctcgactcacagtgcatgaccttaggtctagctcaaacgcttctttgctgaggccatttgttttgtgcctactttggcccatccttgtgtggactgattgggtcgttccagagggttcctgtctctggccctgctttctacctttggcattttggaaacaacctcttccccattcctctgaaagggacactgtggcattttagggttttcagagcatggccagtaaagtcccatctgggaaactcagctgtgagctggaaaatgatgttagtaaaagagagcctccagaaaaggatgaaagaatgtggagagatttcccctcttcaggagtgtaattctcgaactctcctctgacctgctctgttaaaaaattgttctttgtacaatgtgtgtgtggggaggagattctgggataaggcaaggccgttagggcagagggtatgtgcctgggggctaccctagggaggaggaacggctagctgggctccatccctggcctcctgggagatggtttctctggttaccgggctctgggacctcttagcccctccccattggctgcagggcctacagtgcctatagaagcgtaggatggagagcacatgcaggacatgctgggggtggggctggggaggggcacgagcagtggagggcctcaaaccccaactttgtgtgctggctgagtgcatgggctttgaggtgacaccattctggaccctgccaccttgtagtcttgtgtttctttgcatctccaagcctcggtttcctcatctgtaaaatgagactaataaaaatatgattgcatctcagcatgatggtgaggagtaaagagacttaggggagggcgtgagagctatcgctcgtggcgttcttctttatacactgacaggagctgcatctggtgcatgtgggggggaactgagggccaggggtgggctcaggttggaaggtggctgggtggagcattgggaagccccactgggccgacccctctgattgccacttgtgtctcccagtggatgactacctgggcttcctccccacttttgggccctgctacatcaacctctatggcagtcccagagagttcacaggcttcccagacccctacacagagctcaacacaggcaaggtaagccggctggagccctggcaagggcaggatgccagatgcccaggtccctcaggagcccaggcctgcatgcagggtcttccagcccctcctgggggcccacgacctggcagccaacccctcagggagttctccttctgccccttgacactgcctctgcctgagtgccagtctgatccttccatgttcctcgccttgaagcacccaggccccgtctctctgtctttgtcttttaggctgagttggcatctggcactgtccatctgggtggcttgtcatatcccccgaactctctgggccatgctttcctcacctgcaggggggatgaggttggctgagggacctcctgggtgcctgagagatgagctacctcagggccagagggtgcccctttccttcccctcctcccctctgtctcccctgctccttgtgacctgacctccctggcagggggaaggtgtggcttatcgtggccggcttctgctctccctggagaccaagctggtggagcacagtgaacagaaggtggaggaccttcctgcggatgacatcctccgggtggaggtgaggggtgtggctctgggtgggagctgggcgtcggggcagggaagggatggccaggctgggactggccttgaggtgtcatggccgagggaggaggaagctctgcccacacgcatcgtgcctttacctccccgggcctcaagtctcagctgtaaagtgggaataaatcaacacttgccctgcttccctggagggatgatcagaggctcagagaagataaatgaaaatattcaaaaagtctagagcttgatgcaaaatgagatgcgattttatattaataacataaggatagctaactgttaagtcaaataagcactgaacatgtatcaggcactgtgctgctgacacctctgccattactgactcctcccagcaccatgaggtggctgctgttattattattatccccatttcacagatgaggaaacaggctcagatatatcagaggaacaaatggtagagctgggccttgtgtccaggaggtagctgtgtggagtctgtgtggtgctttaagctcttagacacagtggtcagatcgctctggtttgaatcctggctctagcacttaccggctgcatcagtttccctatctggaaagtgggggtaatgattatacttatctcataagacagttgtgggaattaaggaaattaatacacatatgcagtaagcacttactaagtgctagctgttgctactatttacattcacctaacacccaattgtctgacccctcttctctcagtcgtaggattgagttcctgccctgtccccatcccgtgctcagagcctggaggggacaatgagaccctttcatcccaggcacatgacagtggcagcccgtgtatcctgaagagctggctgctgagggagagaccctgagtggcatggggcaggagctctggtcaggcgcctggtggcttaaaagccttaagcccctctgaatggcagataaggcccgggttgcccctgcgggcccagtgggagcccccactcagctgatgtggtggtaccatggctgctggtttggattaggggcagcttgaccttggaggagtagctcttattagggaaacgtggccagacacatgcagacctggaatgagcttgttcagttagcaatgaaatctggatgctgtttctttcttgggctacttgccacccgtcagtccagccaggagctattgggtgccggttatggccggggcctgccagacgtatgtcccctccccagcctgggtgcctttctttgctcctcccgtgaccctctggtctactctctgctctcagaagtaccttaggaggcgcaagtactccctgtttgcggccttctactcagccaccatgctgcaggatgtggatgatgccatccagtttgaggtcagcatcgggaactacgggaacaagttcgacatgacctgcctgccgctggcctccaccactcagtacagccgtgcagtctttgacggtgaggcagtgctcctggctgggaccccgatcacaggatcatagagcagggggccacaccttaaatcccgcctcccatggaaagctgccagagtctactcaaaggccctggtcctggccctggcaaacctgttccagctgtccccttgctctcctccaggcaaggggccctgctactagtgcccacagatgcagctcctgggaccagctgtggtcagcattgaccctgacccatcctgatcatttcaaggagtcagccagccttggtttggacattttagggagtgtggccttgggtttcccagggcagctctaacatctcctcagttttgacatgcccaggagccctaatgagagctgcagctgtctgctcaactcacgaagggagctcaggcacctcttcagacactagggaacacgggtacgggccactccacgtgtccaagggggttcttagatgggaagggtgagcaggtgcctgtctctgtcccacgtgtggtccctttcccagctctgccagtcctagccctggagtgcccaggaggctggcactcttagcaccccatcccacccgccctccactcctggcacagcgctcaggcccgtctctccattccagggtgccactactactacctaccctggggtaacgtgaaacctgtggtggtgctgtcatcctactgggaggacatcagccatagaatcgagactcagaaccagctgcttgggattgctgaccggctggtgagtgaaaacttgcccaaagctgcacatgcctatgcatgcacctgctacccccgctgcatggggtgtctcagaccaccacccactggtgcacacactgacacacggctgtgcctactgacctttgtggttggtgtcctctgtgccttggcaataccaggcttgtggtcctgtcctgcatgcttggaagagaaaagaggggatgtgagcaatctgaggcagccccagtgtgcagtgggacacagagcaagggagcagaaggaaaacctatgccacgcagcagggcacggcctggctctcgctcgcttactcactcattacaggcctttggactcgtaatgcacacaagggcttgtgctagaaacttctagccagaagctagaggcgagaggtgagcaagcagttggctctgtcttcagggagtcagtttattaaaggagggcataggctcacttgtgcctctcatacagggctttccaaacttaggtacaggtgacattccaggggcaaagagatgtggggctccgagcagggcaggtggccaaggagcatcaggaaggcatcataggccagtgagggggctgtgtccagtgcaaggagatggggggtgggaacccagctaggccaccattgcagggacctgggggagggtgaccaagccctgggaaggagatggccttggggggaaattgcaggacttgagctacaaggccttggtggccgactggatttggggctgaggaagggctataaggaggaactcaagtggctggggaattgggaagctggggagaagagcagagcatatgaggtcaggttctgttttggaggtgaggaggagccttctggggaaccccctgcagatgctggatgctgcagtcctggcacttggccagaatggaggagaatcacaggtgggcagaggtgtagaggctaagggaggtgaggaggctgggcgggaagctgatggtcctggcagtggctgtaggggtttctgtggcatggatggggacagctggtgagaaagtggaagagacatgtgcaggccctactgcaggagcatgctcagatcagcaggtggagggaagggggactggagaggcctgggcgtgtctgtgggtggggaggtgagcatggcttgaaggaaaggtggacagagaagggaaagaggccatggtggtcccaccttcccagagactggcagctctaggggaaagaggagaccagcgaatgctgagatggggagaacatggagttgatgctatatagctccagtatctgccttctgggcccatcactggctcacagcaagactccagactccaagagggcagggaccgtgttctttccagttctacgagattggtagtccaagtcctgagcacgtgtccttgctcaggaaggctgctgggtggggaggggtgtgtcgggggctgagggacagtccttggcctctcagctcagggctgaggacccatggagagggctggagaagagctcggtaagggcctgtttccctgggaggcagcacagggagtgagcaggccacaggagtttgaggaaggagctgtctgtgattagaggtggcaggacgaatcctggaggagggcgctcttagtctgagcctcattgggtggtagaatctggaaaggagagagggttccaggtggggaaccagagcaggctcggagagggccacttacctgtgggaagccaggcctggtttgaggtagcagggaggagtcagaagccatcaagttctgcccaagtctgcagacaccccctgagctcctcatgactacatgtgaggctggagttacaggcatgagactggatgtatttgggcgtggggagccttggaaggttcttgagccaggatagaccctggtttgttgggcctggactctgccttctttgctctaactgttcactcctttttggttcagtagcagtgacaaggcctgggggttgggtccagcatgcaccctctgccctgtggtgacacacctgacccttgcctgcccattccacaggaagctggcctggagcaggtccacctggccctgaaggcgcagtgctccacggaggacgtggactcgctggtggctcagctgacggatgagctcatcgcaggctgcaggtaggggggacctggcgcccctggtgcccacctctcctggctcaactgggcctgtttcgctgggagtgctcgtgtgtggcagtgagcagtggcacgtctcccagccacgcttggccagcagtccagcccgtgctgagtccaaaggtggtggagccagtgcaggagttgaaaaggtgacattgagagcaggtcataaatctccctgcagcagcggcagctgcgggcccggcggccggctcacctgaatggggagcattgtgtctctgatccccgacctcttatttccctgatggaatctccaggaggagctggctggggggtggggtgacggcgcccctcattccctcaaggccatgtcggggatcatggtttctgtttagctttctattgacatggctgattgttgacttcaggaaaaaagggcccggggtgtggaggcccagcagaggggtgcatctcacatctcctctgctgccatgtggttttggggagccacccatgggttttgacccttggttttctcaacttcaacctggcatgaagaataactactttataatatcttctaaacaaagtgcctggcccttgggaaggatttaataaatggtagctataattattgctcagaagaagaaatgtcaggagacttagctcctggtctctttatctgacttggtaactttgggaagcttctcttctctggactttagttttctcagctgttaaatggacttaaataattgcccctctgctctccacagggttaatatatgcaaatgtgtgaatatatgcaaatgtattctatgctcccatacgcctcatcacccctccctcagcctggctgtacagccctgctgaacgcatctgagaaactgataaccatggtcactgatccagcatcccttctattgtttgtggctcagttaggaagtgtatctttatcaaaatattaccccagagaaatgctcccggcccagtagtggaattccagacaggccattcacccatttcccccaaccttcctgaagcctggcaggctcagtgccagatgcccagagcatactgacaaaggtacaacttcagccctccagggatggttggatgcgaaaaatgggcagaggaggtaaagtgcgttaggaagttagaggtgagcactgtaggagctctaagcaggtgcatctcattcccacaaattgaattcagggaagcttcctggagaaggggatgccccaggtggactttgagggaggagcaggagttagcctttggagaggggactgccagggcaaaggcacagaagcctgaaatgcctgctgcctcctgggtgggggaagtggcaggagaggctgttgcccaattgggcggccccgagggtctctgctaaggagagctcagccctgggagcaaggccgagggaaaggtgatcccagggtctaaatgctgcaatgtgaggaatggactggtggtggcggcgaatggcaggtgctgggaccaggggaggggagactggacatacggcaggtgagctgtgatgatggtgtaactaagacagtgatagtgggaggggtgggggctagggcagcatggactatttaggagggattatgatgacaagcagtcttctgtgccaggcattgtcctaagaattttacatgtattaaccaaccatgaaatcttatgaactagaaagtaggctgggtgtggaggctcacagctgtaatcccagcactttgggagactgaggcagacagatcacttgaggtcaggagttcaagaccagcctggccccatctctactaaaaatacaaaaattagccatgtgtggtggcgggtgcctgtaatcccagctacttgggaggctgagacagcagaattgcttgaacccaggaggtggatgttgcagtgagctgagattgtgcccctacactccagactgggtgacagagcaagactctgtctcaaaaaaaaaaaaagtaaatgaccctcgttttacagataggaaactgaggcacagagaggttaacttgcccagattcacacacctggtgagtggcagaacccccttgctgtgctgctctgtaatggacagaacctgatgatggggtgaatatgggagccacaggagggttcagaatgatcccctgatcctggccaggggggctaggtgggcatgggggctgtgctctgagagggtcagcaggaggaggagccagttgagggggaggtgaggcattcaggacaggctgtgttgaggtatctgtgaggaagctggcctgtggtctggaggtgggaggacagagtggggttggaggggcacatatgggcacggtcagcctgtggtggctacagccactgggtgagctccccagggcatccccggggccccagatcccacctgcaaggtgactcatggtgccatgttggcaccaccttgggtgaggtgggtgggccaggactctgggttctacccgtggccctgcacatgacccccgtgttgtttgtagcttggcaggtctgaggagcctggaatatctgagacctgtgggccctgagtccttggctgccctcagtgacctctgcagggctctgctcttggaggatctgcctacaaacagttctggcgcctttgagtcactctcctggggttggaagagtggctgggcctcccagcagggaggctggttccagctcaggagcttgggaggggaactgggttcccgtcctcttgagaatgcataatgcctctctgggggggaattccaggcagcaggagcaattcgctcagctccacctgaggccactgagtggcccagcacctcagctagagggcttcctccacctctcactgcagtgctgagcaccatcacagctgataggcagagcagccgggcatgggggccctgagcgaactcaggcccatagctgaacacagcagctcaccctttctccagtcagcctggcccacttctccagcatcggtgttcctcattccatctcagcccttttcccggctcatcttccgggagcctcccccttccccagggctggtggtgtccactctgttcctccagcccagccctcttctctgatctctagacctatgaacccaaggtgctggacatgtccacgtggatgtcccaccagcacctccgtgctgcgtctggggctacacatgttgcagacaggtttcatcacctcccagcactgtcttttcctgggtccccagaatccacgctggaaacctgagccagctctgactgccctcctcctcttttctctgccccagccctggtggctctgcctcacccatgtccttcctccttccttcctctcccacccctcctttagtatccccatcgtcttcaagctgtgtcatgcctgcctccatgtcagccctgcagtggctgctgctgcatccaggaaaagcccctgctctcatcctggtggacaggcctttctgtccccaccacctgcctcacggagccctaacgcttctgaagctctgcgctagtttgtccggccctcagcacccccacccctacaggctcccccttgcctctgtgtctttgcacttgtgcacatgctgctccatcagccaggacgcccttcccactctttgggccttactaacgcctgctggccctgccaggtgcagctcagggccacttcctccaggaagggctcctgactctgaggctgctcaggtggggatctgtttgcgtctctgttctgcggacttcctgagagcagggccaggtctcatctctggaggcagcatccagtccaagcccagggcagagctgttgctcactaggagtgaaatgaatgccccgaggccagttcatctttcaggccggacactgcccagggtacaggtatccacctggccccgcagaggcaggcagggaccttgggagcagcccagcccactctgctctcagcctgctgagccctgcgctgggcctacctgcaatttccaagtcagccggcgttggcggggcccctggctttgcttagggctgggtggagcgccatcagcctcctcttcccggtctccccttctttccgtaccccctgccttgggctttcctgaggagggaaagagccgagacagcacggagacagcttgttagtggcactcacaggtcctaaatgtttcttggggagtcttggctgggctgtggcctccatgaaaatctccctttggtggtctgtactgcagcccctcccggctcccgacccgggctgggcgcataaatcaccctggttggctcggctctccctatccctctccagacccgcttgcccccgctctcaggcccactcaggcctggttcccaggcaggcccccgccccgctacccaccgagcatgcccctccaccaccgaggagcggcctggggcagcccatccgcggcaccctcggggcagtaaatattatattactacagggtgtgcagtacgtgacctgagacaggccccggggcttaagtttcccgagatggagtttgcgtactgctccccccatcctaaaaattcaattaaaaaaaataacaggaaaaatgtagtgcgccgagggcctgccagagcggtgtatctggcggcggcggtgccgctgcgctccggcggtaattggttctgcatagctcggggaaattggcagaaaaataaatcagccgggagccgggagtcagacgctgcagggaggggaggtggggggtgctgcaagtggtgggagcagacctggtggagcgggtttgactaatgtcctgtttgggagtcaagggggtgaggtgggggcagggcagcccccataccctcagtggagaatggaaaatggagaggagtcccgcttggttagggagtgcacagactgccccgccgcatttctgcatggcccttgtgtgggtaccgacccctggccttggaatggcgaggaggagccatatgaaggactttcagggcgcctccgtgggatgggggaggtcagagttctttgcctctaaacaggattgagcttaaacctgacctcctgtctctcagggctcagggctgtgtttctggcattgcatgtaccccccacctcctctccaaaggcttcccaaagcagagtgttctgggaagggttctgttgtggctccccaccccacctcaggtggatacatctgagctgctggcctccctgcagtgcctgcagtagctcttcaggggttcctaaatttcttccttgaagaatgtggacacagcacagagcagacttgtttcagtgcagggcactcagcgctggagcctctactctaggaggatccaggaggcaggagcaggaccccctgggccctccgagagcctgtagtcagtggggcagaggggaacacacatgcaaaagaactcactggactggagttgaggacagattccaaactggcagtcctggaatcgagggctgggggctccagatcaggaggcgcgtaggctgacatgggtgaggaaggcttcctggaggaggtgagggtggagcacatcacatagagatggctgtgtgtgtggagcgggctggagaaggcacccagcaggcaggcggagggggtggggcctgctgtgagaacctggcacatgtgcatgcctggacctgggagagccctgggctcatcaggcgcattccatctgtccgtccctcacagccagcctctgggtgacatccatgagacaccctctgccacccacctggaccagtacctgtaccagctgcgcacccatcacctgagccaaatcactgaggctgccctggccctgaagctcggccacagtgagctccctgcagctctggagcaggcggaggactggctcctgcgtctgcgtgccctggcagaggaggtaattaagcctgggggtgcctttcttcttctgctctcctgctgcctggaacatcagaactggcagggacaaggcgaatgtctggattattacccaccccggttccattgctgggtgaccttgggcaggtgacttaacctctctgaacctcaatggaccaatttgcagaaggaagagagagggtacgatggaatactgggtgttatggggcccagcacagagcctggcacacaataggtaactaataaatgccctctgtttgccaaagtatgtcagagacagagctgggaccagaatccaaggtacctggttctaggttcagtgccagggccagcttccccaggttcccgactcctacttcctgccagccagtgcctgtctgcacctggccaacaacctgccctgcctggaccctctgtttcctgttgtcctggatgcctctgaaccccaggcccaaggaggcttcattttcagtaactctgagttttgctgaatctgatcagagagaaccggctctggtttgtctttggggaactatttccccacctgcagaccctccccctgaggtctctgtggccagatgcacccacccggttctgtggcaaataggcaggtccggtatttgtctggaatgagaagcgtctgctcataagtgttgggcagacacagctgctgcctgctctgaccagagccctgtgggactcccagggaggaggtaggggctctccccaggagtgtgagaagggcagggccaggagagcggttgctggaggaagctgtggaaggggagagggaggctgctcaggaagggatgtgggtccctggagtcagcagggcctataggcacaggctggttccctggtggacactgtgtcgctcagctgtggaccaactcctcacagtggcagcagaccaacccctcaggctggtcacgggcttccctctgtaatctcagcccagactgacccgtgaactgtaagcacaaattgtgatatggctggaaggggttaaggtcgaacagtgctgtcactgtaagggccccgtggagagagcccttctcaaacttgcatgtgcatcagaatcccttggagggcttgtgaaaagcaggttagggcccacccctcgagttcctgcccccctggaactggggcaaacctgaaaatatgcatttctaacaagttcctggaagctgctgctgctgtgggtgccacactttgagaacccctggtatagtggttaggaacacatatttggagtcagaaaaacctgcattggctcctaagctctcaaagcctgaatttcctcacctgtcaaatggggctgcctgtcctgcctcctgggcttgctgttggggttcagtgaagcgacgcatgggcatgcttcacctgtgctgcaggagcatcagctcagcaggaccctgggtggagacctggggctcacttgggctcactttgctcatcatccttggaagcaaatggacccttacccaatcagcctgctctccagagtgtgcagctgggagcagttgtcaatcatgctggaggggcttaggggcctcacagttttgttctggactagtcaccattttcagagtccagtgtcttcaggccatgggagtcctgctgctacgggaggagggtgtgtgtcctctgggaagggcataccttctgtggatctgttcccgctcttggggctgaggaaggcgggtggtgtcctaggcgtaatgttacctccctggtcaaatctagttctctgatgtttgccccctgggaatgtctacctggtagcgaggacctaagaatgtaaggtttgaggtccaggcaggagtgtctcttcccagaaggatgtactcagctcagtaaccttggtgggcttctcatgtgagctgggggcagccttatgctctgttctctgggggctcaccgccactcaagccagacactggccagccctgggaggtctgggggaaggccagggtggacagtgtgtgggatggaagctgggagaggagaggcctctgtggcctctgagtcagaggtcagctcacggtgtggctgtggggcgtgggcctggtgtgtcaccatccccaccccgaccaccaccctctgttcagccccagaacagcctgccggacatcgtcatctggatgctgcagggagacaagcgtgtggcataccagcgggtgcccgcccaccaagtcctcttctcccggcggggtgccaactactgtggcaagaattgtgggaagctacagacaatctttctgaaagtgagttttcttttttcccaagtcatgatcgtatttttcccaacataaggcctttctcccatctcttctgtttcccctcctgttcttgacctatcttagttcttaggctgtggtcttggaaggagaagaggtctttgggtaaaacaatttcccttttcctcggttacccccgaagtccccaggcccctgcacctagtctaggaagttagtaggtttgagccggaatcactggcgctgggagtgaatgaggtggagtctgtggcccaggccatctgggagggctgacccctggggctgtgtttgtccttccaggcaggtcccttatagggaggcctcatcctcagttcccaggcactagcaggccttgcatgacctggcttccacaccaacccgagtgccctggactggagctggagccactctgaggctcaagtcctccctgctgggaaggctggtatctggggcttgggacaggcacaccacaatctggacccactggagagctgggagcatgtaattctgtcccctggtctcaccagcccccacctctcctgccctttctcctcttctaacacccatccctgctccctcttcctcctttccaggagggtcaccagctttggggacgggtgacagggaggtgagtgggtgcttggggagagcccatctgtgctcctctctaggctcatgcgcggacatagagccaaagctgctgtggtcatggtgtggcctggcgtgcaggacacaatgcgggagatccctccctgcacgatggctgcccaggcccaagggagggccctccttgaagagctgtcagcaaggctgcccctgcttggggaggagtggccctgagaagcaggcctgctccttaccttttttttttttgagttggaatctcattctattgcccaggctggagtgtagtggtgtgatctccactcactgcagcctccgcctcacaagttcaagggattctcctccctcagcctcctgagtagctgggattataggcgtttgccaacccacccagctcttttttttttttttttttaattttagtggagatggggtttcaccatgttggccaggctggtctcgaaatcctgacctcaggtgatccgcctgccttggcctcccaaagtgctgggattcaggcgtgagccaccgcgccagccctccttacctcttttcatttgccctgaatagctctactagcattcaaggactcctcagcctaaggcaccagactttcatccagcctagtccacctccccaaagcccctccacgctggaccttccccttccctacatctctcctccctcctcccctcttccaggaagtcgttgttgacttactttagcctggaaccctgaagcagagccccctgagtgatgctgatgcattcatatattggccagtcctcttgttgtcccctggggggtgtggagagggcaggtttcagtagcacagaggatgccagggctggttggagctctatgtggccttgggcaggttgcttaacctctctgaattgcctgttgtcttatcatctgtaaaatgagggtgggtggggctgcccactttacaggttttgagggttgagttaggtgacacaggtgatgggtcttgctggaactaagtgatcaatggatgttagtttctctccccacctctccccttttccttttggggagctcccctgctctatgcgtgccatgactggaggccaactcaaggccagggatagtagatgtctgcacacagttgtgtgagtgagtgtgtctgtgtgtgtgtgtgttgggcagcaggctgcccccatccacctgctcacatgccacctggggcatgtttcccattagattctaacctcctgtgcttgtcagagcctaacctctgagagtctacctcctaagccagttcctggcctggtagggcagaaaggaaaggaagtcaaggagtggccatatctgagtggggctgaccggggaaggcggtctgcgagagtggcgggggcggggcggggggtgctgctgaattgtgcctggtggacttgctgggaggggatgagctccaggttctgacctcttggccatgtagcctcagggaaatgcaaactgaaaattttccctggtttcaagcaaaaaaaaaaaaaaaaaaaaaaaagatatagaattgtttctcgaagtcttccccactgagtttatgagccccgccagtagctcctgagcaagctctacaaaaatgttggcagcaagcagagaccaagaaaacattggtgtttcttaacttaaaccaaagttggaaaaaatgagcaccagcagagagagagaggagccccaaactagacatttctttatttgctgttgctattttgggtccagcaggctggccccgtctcggggaggacaggggagagagccgggggtggatgggggaagtgggggtcaggcattcctgccatctccctggggctggtggtttggagggtaaaggcagttaaccacccgggggagaggacagccgaagcgaacagccatggagaggtttccccggggcatgacacgtggactcaggggctcctacaggcttcattgaagatgaaccaaaagaaggggggctgtgtccgcaggagggaagcgtgaggtggccctagccttggcatgtcctctgccccttcctgagcctcctacctgccctgggctctccctccagggatccaggcctccctgaccagcgtgggaccccttacctcagctgccctttcatcttctgaacccacccgttttctcacttggctatactgctctgagctcatgacactaggcctgggtacttaatgtgttgcctcctctaggggacaatgtgaattttaagagcaggagcttctgctcctcaggccatgtctgacctttggtttcaatcaaatggtgaagtaattgtggagaataatttttgtttcatgttgggttgttgtggttattccatttggcagagcttctgaaagtttcaggaaaaaaagcagttgaagaccagtgaatagtggttgacatgctgataatcacttgaaagggtagggatattagatgatacagtaaccaaagaaataaaatactaaacatggagggggaggctttaatttcttctctttccagatctgtatcattgtatctcctttagagacaagttttagaactgtgctgtccaatatggtagccacagatggctatttaaatttacattaattaaaagtaaatgaaacgaaaactttatctccgcagtcatactggccacatttcaaatgctcggtagctacatgggcctagttgactaccatattggatggtgaagatataaaccattttcctcatagcagaaagttccattggcaagcactgttccagaagaaaatggaagcgaggctgtggtgggagaaggggagaggagaggtcctgggctagacatggttcttctctgcagagcgctcctaggagggaatgatgtagcctttgcctttgatggggaggaatcttggtgaggggtagggggtggggtggacgtttcttaattgcacactccccttctatgcaattctggtaagcgctcccacaggggacactcccagtgagggtgtcagcctgctctacccaggcttggaggactcctcctccccagcctctcactgggacatccggatcctgaaggggactgtgggtttctgtccttctctggtacccagtatccgatggagaaggtgcctggcgcccggatgccagtgcagatacgggtcaagctgtggtttgggctctcagtggatgagaaggagttcaaccagtttgctgaggggaagctgtctgtctttgctgaaaccgtgagtacctgccagcccccacctctgcctcccactacctggagctgccttggccccctgctcacgcctcattcttcctggccctccagtatgagaacgagactaagttggcccttgttgggaactggggcacaacgggcctcacctaccccaagttttctgacgtcacgggcaagatcaagctacccaaggacagcttccgcccctcggccggctggacctgggctggagattggttcgtgtgtccggagaagacgtgagtcgtgggcagggagggctggggagagccaggccaggctgcccaccatggactgcaccctccttttggaggcaggctggggtctgttgatccctctgcttgctcctgcgctggtcataggaacttccgctgaactctcccaggactgaggcttgccaggcagcagtcctttccagaagggcttggatggtcagacagtcctttattcttttcattaaaaaaatttttttttttttttgagacagagtctcactctgtttggaggctggagtgcagtagcatgatcgcagctcattgcagcctcaacctcctggcctcaggtgatcctcctgctcctgccttctgagtagctgggaccacaggcgtgcgccatcatgcctggctaatttttaaattttttgtagagacagggtctcactgtgttgcccaggctggtcttgaactcctgggctcaagtgattctccctccttgaactcccaaagtgctggggttacaggcttgagtcaccacgcctggccaggcctttattctctctcttttttttttttgagacggagtctcgctcggtcgcccaggctggagtgcagtggcgcgatctcggctcactgcaacctccacctcccgggttcacgccattctccggcctcagcctcctgagtagctgggactacagctgcctgccactacgcccagctaattttattttgtattttagtagagacgaggtttcaccatgttagccaggatggtctcgatctcctgacctggtgatccacccgcctcggcctcccaaagtgctgggattacaggcttgagccaccgcgcctggcccaggcctttattcttaagccttcgttctgtgtggtgcccactgggtgtggccccatcctcaaagacacccaggacaagcccatcacctcctctgcacgtgaacccttctcgtgtctgggctgctcacacatcccctgagtggtcctttctctgtcagtccctctcagatccacgtggtccttctccatgtctattgccgcctttgcctctctctcctctccttttcctgtttggttggcattcaactctgtggtgtttaacttttttttacttaaaaaaattgaagtataacatattatacagtcaagcactcaaatcttatgagcacaacttgataaaactttatatttttacaactatccatcaagcctcgactgcccatcctccttttgctgtcttcagttggcccccttttctctttatcttgggtgatgtgctcttttgtccccgattatctcggagtgtccctaggtctccttttcactgtctgccttggtctcttgcacccttccctccccaccccccatgtctctcattgttggttggggtgaggctgacatacgcaggggtgctctccaggaggtggtagatggatgggggcctctccagcagagcagcagagactctgaccagccctcctccacagtctgctccatgacatggacgccggtcacctgagcttcgtggaagaggtgtttgagaaccagacccggcttcccggaggccagtggatctacatgagtgacaactacaccgatgtggtaaagcaggcactcaggggcaggtggggtctagacatttggtctctggaggcacctggtgctcagggacaggtggggcatgtttctctttgccccctcttacctccggagacttcatgctttgatttccaaagggaaagtgtggggtgcagtggtggcaggacactgactctggggctctgcccttctgtctgggacttggaggacgtatgttgtcaagttgcatcttttctgcctccctgctcacatctgtctgtctcctctcattgcttgcctgttcggttttgtccttagaacggggagaaggtgcttcccaaggatgacattgagtgcccactgggctggaagtgggaagatgaggaatggtccacagacctcaaccgggctgtcgatgagcaaggtgggcagcatgtggaacctggcgagccccatccccggcaagctctcaagccatgctggtggggacgactgaatgccagggcccttcactgggctatttcacccagggacgcttcttgaaggcaccccccactccaagctgcaaattaggaccgagagtcagtggccgctcaagagtctgtgaccatgccccaaattcagagatggtcccaggagagatggggggaactgccaagcaatgagtgaccggttccccctcccccaggctgggagtatagcatcaccatccccccggagcggaagccgaagcactgggtccctgctgagaagatgtactacacacaccgacggcggcgctgggtgcgcctgcgcaggagggatctcagccaaatggaagcactgaaaagggtgagccagcaggtggtgggtgggagtgaggcctgtggtcacaggtggccagtaggcacagatgcagacctgcatgcccacagacacatgcatgtgtgcacacagcatgcacagacacctgggactcactggaggtgctcacagatcacacccagcatacccaaagatcacacccagcatacacacagatcacacccagcatacccaaagatcacacccagcatacacacagatcacacccagcacacagatcacactgggaacacccacagatcacactcagcacacacacagattacacccagcacacacacagatcacacccagcacacagattacacccagcacacacacagatcacacccagcacacagatcacacccacagatcacacccagcgcatgcacagatcacacccagcacacccaaagatcacacccagcacacacacacagatcacacccaacacacccacagttcacactcagcacacacagatcacacccaacacacccacagttcacatgcagcacacccacagttcacacctagcacacacagattacacctagcacacccagcacacgcacagctcacacccagcacacccacagatcacacccagcacatgcacagatcacagtcagcacacacagatcacacccagcacacacagatcacagtcagcacacacagatcacacccagcacacacacagatcacacccagcacacacacatcacacccagcacgcacagatcacacccaccacacacagctcacacccagcacacacacatcacacccagcacacgcacagatcacacccaccacacacagatcacacccagcacacacagctcacacccagcacacacacagatcacacccagcacatgcagagatcacacacagatcacacccagcacacccacagatcacacccagcacatgcacagatcacagtcagcacacacagatcacacccagcacacacacagatcacagtcagcacacacagatcacacccagcacacacacagatcacacccagcacacacagctcacacccagcacacacacatcacacccagcacatgcacagatcacacccaccacacacagatcacacccagcacacacagctcacacccagcacacacacagatcacacccagcacatgcacagatcacacacagatcacacccagcacacccacagatcacaccgagcatggatcacatccagcacacccagcacagatcacactcagcacacacacattacacctagcacacccacagatcacacccagcacacacacagatcacacccagcacacccacagatcatacccagcacacccacagatcatacccagcacagatcacacccagcacacccacagatcacacccagcatggatcacacccagcacacccagcacagattacatccagcacacccagcacagatcacacccagcacatgcacagatcacacctagcacacccacagatcacaaccagcacagatcacacctagcacacccacagatcacacccagcacacagaaatcacacccagcacacccacagatcacacccagcacagatcacacccagcacacccacagatgcttatagacagacacactcagatgcccatgattacagaaggtcacatgcaaagttcacacaccaacctggaagatggaaagacacccatggactttgtcttaggctgggtttcctggaggcagaagctaagacgtagatttggctgcacattattggggcagtgccctcgggagtgtgaggagcaaggatgcagcttcaggcaggtcagctgtggcctgagctgtggcctggggaagttcacaactcggaacaccacagaatcctcacctggaggcagggctgggctttgtatcctctcagccatctgtctaggcttggggttgctggggtgagctggggcacatacctatctcttcagtgagggggtttcctttagcatgggggttccctggagcaggtggcttctgggagctgggagctgtcgatgctgatggcagctggggatgggtgcgccacacgtgtacattggctggtgagggggctggggtgggccccgttggcattcatgcaatgcaagcacacatgcccacagttgagcacagatgccatgggatactgtcaggcccatcgtgcacatggatgagcacacgcaagcacatgcacttgctccggggtcacacaggggcctgtgcactgcacagcctctgtgcccgcctgtcctggaccttcttggtctatgatcttccttcctaaacacacatttgaattttggctcaagaaccagacctcccttagtccaggagtagcctgtggcatgacctaggttccttcctttctccttgggggcagagaacctagagaggactcttgctggctccagggaggggcaaggcttttggacaaccagctgttcctggtgctgtgaaccagacagattcaactttctccctgaaggggcacccagcagacagaggcaaagcctgcccaggctcatgtgccttgcccaccaccccacagccagcatccttcctggagagtggcacagctggcctccaggactggcccttgtcactgtgctcctggcccagacctgaggtggtgtctgacaacagtgccaggtcaccctctcccaggagctgaatggcaagggggctcccgggactcccttcaggcccaggaaagggaccccatgaacgaggtacaggggtgcctccatagctgagttgggtctagctcccaggggtgaaattggctgtggttgggaaataggatcttccttttacctctgagctgcagacccactacaggatgtgaagatgaaaaaggaaatgacaagaaaactttggattcatgaaatccacccagaattcaaacaaataagcaagttaaaagcccagtgttttcgtcactgcgtcagcctaccttcctttctggctgtttggttcttcccgcagcccatggagcctcctctcccctcctgatttttctttttcttttttctttttttcttttccttttgagatggagtctcattctgtcacccaggcttgagtgcagtggcgcaatctcggctcactgcaacctccacctcccaggttcaagcaattctcctgcctcagcctccctggtagctgggattacagacatgagccaccatgcctggcctcccctcctgattttctgacctggggttcctgtggctgcagaaagcccctctcctctaggtggccctcccaggttttcccacctggagggcactagtgtgggagctggtggggagttgtcatggaagacaggaaggcaaaggtggagccgagcacagaactccccccagccttcccaccggcctctgagtctgccccttctcttgtgcagcacaggcaggcggaggcggagggcgagggctgggagtacgcctctctttttggctggaagttccacctcgagtaccgcaagacagatgccttccgccgccgccgctggcgccgtcgcatggagccactggagaagacggggcctgcagctgtgtttgcccttgagggggccctggtatgtggggctgcacttgtcctggcttgggtagggtatatcttggtttcccagggctgttcgggctgatgtgggagaggcacagggaccccaggttaggacttttggatggaacgctggctggtcatcctggcgtcagtacctgtggggtggcatgtggggaaagcagccccagtctgggtgttcttctaaaatgaaaaagctccttccttggcactgaaacacttgctgctactactttgaggtgtcaagatgaaagcagaggggaagatggccttggccgtctggctggcctgtgcctggctggctggtgtgaagatgggcgaggaggcccatgggaggagtgagagagttcttgtggccccagagtgtccttggttgcatgtgcatcctcttgaggcagagaccatctcatggtcatccccagcaattttggggaagaggtgtgccttagaagctgagccccaggatgactttcctgcccagggtgcgctttctgtagccagtggaactggggtaggctcaaggttctccagggccggggtgacgggctccccaaaagagacgagcaggtgtctcggggacagtctgagcgagcactcggtactggcacacagccagtccccactctgctgctctggggaaggagctgctccctctgaaatccagccaggactggcacctccctaggggtttgggctggggccctagggagcaagccccatgggacgtgagggtgtccatgtgaagccagctgtgtggttggggtcaggctgggcacctatctgtaggacagcctggctttgaaggctggaggagtgctgtggggtggctcaggatctgttgggctggccactggcagggaggtgaagccagcagtggccctgagagggagtgggtgggctggggaggctctgtcagtctcaggcctcgatggtgggcaaggcccaacagtggcagtataggagaggaagctctctgggggcctgaggacgtcagaggagcctgccataggcttcggagagagcccctcccttgccctggggccaggtcaaggggaggctgaggggagatagcagagctctcggctctctgggctatggactggtcttccggccagggtcgggcaggataggatggaattgctgcccaggtcagagcagctggggagccttctggggtggggctggtgttctgtggccccctctgctttgagtcagaaagggcctggcctgagcactgggcaggggctggtgatgatcctgcggctctagctgaggggtggggtataaagaccttggcaggcctcagagtcagggccaggtctgagaaggccaggaaagcaccctgtgtaatcaggatctgttttcatcagccagagctctactcaaaggggctgagaagaaaagtggtttgtgggctcacagagctgggaagaacccgagaggtgaagcaggcattaggcctggcaggaaacaggttcatacagtgtccccaggactcgcacccctgtcttggccttgtctcacacgggctctctctgtgtggtagcaaagatgctgctggtgacgaaaggccaacatcatccctccagccagcaaagtcctgctagataaagtagcccagcccacagcgccacactctgttttccatgcagctggagacccctgagtgctgccttctcagtaatgtcagtgaagtcttcggcatgactgaccagctcagcctggtggtgcccagccagcccctgcacctgggtgagggatggagcgttctgattggccggcatgggccatgccccttctctgtgattgacagtgccaccagattggggagaggagcttctgaaaacaaaaacaaaaaacaaaaaccaaagcaatgttgggcaaagagctccagatggtccagacggtgaccagagcagtagggagccagtatgagttgttgacaagaagagtgctctggtcagagctaggctttaggaccatcagtcaagcagccatggaggatgcttgggaggcagagcctcccatcaggaaaccccaggagtcttgtgtagagatccaggagaggtgaccacctggcgtgaggccgtggggctgaggtggagggaggtgggactgaagggtttggggagggaagggccagaggtggacagtggggaccctgtggttgccaggccgcagggcggggtggggcgggctgtgatgagttcacggttggccctggcaaggctgacacacacggtgaagtgctgtgtgagggagacagagctgacggctgcctgccaggcggcccagggcaggaaggctggagcggggagccgagggggccgggagtggggaagaggtgactggagacacgtggacaaagcgtggatggaccctggggctggctagggcctggaggaagaaagtgacaaggctgggggacccaggccaagctttcatggctcagcgcctgggagaatgagggggggcacttcccagaagcagagagaccgatctgcgtattcttcttgtggaagagactgtcctgagggatcactgaaactaggcgtgaagtcagcagccatgggcgggtgatggattgtaattcacctgtgacttgcctatgatacatggaagagaccaaagtggcaaagccccgagtcctgggacagcttggctggcagagagaaccagaaagggaggcggtggcttcagagggcagatcccacagacctgcagctggaggaccagagagttttggaaggtttaggtgtgtctggcatttggacggggccacaggcccacttgactgtctggaagactctatacctgagtgacacacactcacacactgtcttacacaccagcacacacaccaacacacactcatacacaccaacacacacactctttccactcatacacaacacactctgttacacgaacacacacaccaacacagtctctctccacacattcatacacaccaataagcacactaacgcacacatacacactcatacaacacccccacacactaacacccatacacactaacacctacacaatcacactctcacacataccctcacacacaccaacacactctctacacactcccatatataccaacacacacacacagccccactctcatgcagcccccccactctcacactaacacgtacacaatcacacacataccctcacacacaccaacacactcatacacaccaacacatagacacacacacattctgacatacactctcttacactcacacatacacaatcatatgcacacgcacccacacacactctttcacactcacactccccctccacagtcacgtttccgtcttcctgctgggacccagaatggtttgggctcccgctgctgagctgctgtctttgtcccgggatgtcctgatgccccagcacagcactggggctaaggtcctccctgcctcctggggaaggtggttggattttctgggtgctaggacccggcttctgtcctgagagctggtctttgcccacgggtccctgatgcctggtgattcattggtgggatgggtgaggcctctgtggcttgaattctgctttccctgcttactagctgtggacgggtcactcatgccattagcaactctgttacctcactcgtgcaagtaactgaatcccagggccattttaaggatgaatgacgatgcatgtagtgaagcacttctcagacttagcaaaagcaggcaccgtctggggatattgttaaaatgcagactctgattcagggtctggtgggccccgagaatctctgtgtctaacaagcctccacatgatgctgatgctgctggtccaggggccatctcggagtagcacagatgtgaagtacaaagtgcctcatcaagatggggctcccattggccccctacttgggtgcccttctgagagaggcagagcatgtgcattcctgctgggaggtgtgtggccagggtcctggagagggaggtatggcaagatgacatgttctccctgctgcttggtgggggaaatgtggtctttacttctaatgatcccctgatctgatggtggaggcctggctcatggggaactcctgtctgatcaagaagagagatgttcacatgtgagtgcaactaaacccctagaatctgcgtctttgaagtgttggaggtagaataagagtcattccagagtggcagtgtctaatgaggggaggcttcttgaagaaggatgttgggaggcaggccttgcaggggctggggaaagaccgtgggtggaagccaggtagccttgctggtaatctgacagttctggaccaggtctgtggtgcccccttgcctcctgccaccttttccctgacccaacacgtccaccagcgagctgggccttgcctgccagctcccctctggaagacgtcttgttggaaggcaggccctgtctgctcattagcacgggcagcctttccctgaaaccttctgcaggggccaagcctggctccttccacggagcgggaggccctggctccgtctgctaatcgtctgctgtctccatcccgagcattattttattttcgtattattctttttccagctaatatcctggcatttccaaagacaccgggtttcataatcttcctggcgttcccagggagctgggaagcagagcacaaagccgctattatagcgcgttccatccagcctccctctccaccccacaccccctgtggccacagcagccaccaccgccgcctcccacccagtcaccccctcctgacgccaccggcctctctgggaactctggtgacggctgccgggatgagctcacagaatccatcctgttgcccttgccctgggcctgccctccatgatcgaggatttttccaagccctgcctctgtgcttggcttgagtgttgggaaaggttctctgagatgcctgggcctggcagggaggggagggacagaaacgtcggcaacgtgtgctcagagtcttggagatttttgctgctggaagaaactttcattttctaaaggcgtgcctgatctgccttgggagctgtaggagcatcttgatattggatggaaagttgtgcatgtgtacgcacgcatgtatgatctggtgtaagggccatggttttatccaatgctccaggggatccaggaccccatagaggataagaattattaatattcactttaccacgtgctaaaaaccaggctttatatgcgtcatctcatagtgaccccagaaggctggattctattattagccccattttacagttggggagactgaggctctagagctgcactctcccacacagtagccactagccgtgggtggctacttaagtttacagttaaagtaatcagaataagaaaatttgattccccaatcagacaggccacatttccagtgctcagtagccacacctgccgagtggccagctaccacattgggcagtgcagccattgacggtttgatcattgcaggaaggtctgctggacagtgctgctctggaatgactccgagccctaatgtcaccttggaagaggcctgagtggggatgtccagcagcacagcacgagtcagtgcttaaccaaggtccaggcagtggctcttctgcccctctctccaggtgtcccctgaccagcagccaaaccccatctggcgctttcattcccccacttctatgagggcatcatgtctctcctgctccatggagtccctttgtggtggggtcccagggtgggaggattggatgctgctggctagaggcctctgccctgggcaggcttctcctcacctgatagccaggcagcttggcagtcctggggcagtcgggcagctagagaggagctggccccccggccccaaccctgggaaacctccagagggttggtggaggccagcatcccgactgcagtagagaggaccctcagagacaggcagctcaagcctgggccggcgaggcaaggccagttgggagtcagaagtgcagggatgtgggtcagggaaaggctggttccagagaggagtaatttgggtcttgagctggctgaaaaggaggtcagatgtggatggggagggaggggcggctctgcgcctgaaggaagccatgctgtgggcaggggacccaggcttggttcccagagctggcactgtgagcaagggcaggccctgggaggtgcgaggggtttacctcattaggaaacaagacctatggctggggctggggctggggtgttgaaaggcagctctgtggatctctggactctgtttcttgaatattcacgttgagcacctgttctatacctggcattgtgctagcatgggcggcttgagggctggatctcctctcaagcagaggcctcgctgctcttcctactgcccctcagtaggggacaatttgggtaactctaaatgcgtggaccctgcatctgtctcgctcaagatttgaaccccaaggtctggaggattcgattgcgtgtccatgtgcctcaggcaaaatgccagcgcccagattcatggctgcagaggagtgtgttacagttgggcacatgtgttgagtatcacccatgtgggtcattgtacatgcatgagggtcttcatctgtcattgctagagtgaccatataatttactgtccagtctggaacactattaataatcacactggaaaagcaggcgtaagtaggaccattccaggcaaactgggccatagagttgtcctaattaccaaggcaccctggcgtgggatgaaacctgctccagtgttctctgcaacatccgcatgtggagacatggaaaccctagagggacaagcacacacgcatacacgctcgcgccagcccacacgtggcatcgtggattctccaggtttcctgattccaccctcagctccccaggggccagccagtagttttgcaaggagtttagcagctgcttccaagccctggctccagctgtaaattaaatggggttgcactctcgcctgctattccacttaaggttgcaatcagccctgattagaaagggagtctgtgtgttcctgtgttccgttctgtcttttaaagggttcccctcctttggcctgggctcctggcctgtgtggggtttccctgcaagctgaggctggagcagccagggaaatgaagtgggccctgggttccccacagccctgacttggcattcaaccatctgtagctccagaactttgctcaggtgctttgagctctgatggggtagtaggagcctgggaagagccttgagagtgggcaggaggaccccaggttctgccagctaatttgctgtgtagccccagggaagaccttaacctctctgggccccagttttcttgcttatcaggtgggaatgctaaaaacacaacaaaaataataacctcttcttatggagcaggggtcagcaaactatgccccacaggccaaatctggccctctgcctgcttttgtaaataaggctttattggccggtggctcacacctgtaatcccagcactttgggaggccaaggcaggcagatcacctgaggtcaggagtttgagatcagcctggccaatatggtgaaaccccatctctgctaaaaatacaaaaattattcaggaggctgagacaggagaattgcttgaacctgggaggcagaggttgcggtgaactgtgatcgtgccattgcactccagcttgggagacagaaggagactccgtctcaaaaaaaaaaaaaaaaaaaaaaaaaaaggctttattggcacatagctggtactcattcacctatgtagtgcctgtggctgcttttttgttacaacagcagccgaacagttgcagcagagaccctatggcccacgaagtcaaaagtagttagcacttggccctttatagacaaggtctgtcaacctctgttctagggcatgtaccgtgggccagccattgccttctgccctgtccacatagtatctcatttaacccttccagcagttctaggagatagggtctgtcagcactcccattccattttacacttaagcaaactgaggtaaccgagaagccaagtagtaattgtttagctgtgtttcctcccatgaatattgtgaaaaattttatggataatggttgggttgtgcagggtttgtagtagtgtacactacatcatcatgttggcatttggatgtcccagcaaagcctatagtgaagagagtgaagatggtgaagacctggaagatcaccctagaactgtgctggtcaatgtttaacaaccaggtctccagaacaaaacaaaacaaaacaatccccagccctggtttgtagcatttgctgatttccatggtgtagctgttcctgccatgaccaatttcaagctagcaatgtggcaccactgaacacagagctgggaagagacgggcagtagcacactgatacataatatttccatcacagatacatgagatggaagcagcctcaggagcagagataacgggaaaaggtagtacaaaaattagaatgggccaggcgtggtggctcatgcctgtaatctcagcactttgggaggctgaggtgggaggattgcttgaacccagggaggttaaggctgcagtgagctgtgattgcgccactgcactccagcttgggtgacagagcaagactccatctcaaaaaaaaaaaaaaaaaaaaaaaaaagagaaattagaatgatttcaagtatttaccaccttgagtttttaaatatagtttctttagtggtaaatgtatatgatttaatttttactaatggctgtgtttaacaactggcttgcagaattcctgaaaatataatctgctctcgtgaaccacatgcgctcactccagcacctgctgctctgaggggccccctgaccccttttacataagagatgggggatggcccccaacagtagtgccccttccaacagccctgccacaggtgctcttcaggcccatcctgtgtaggagttgagtcctccccataaagtgaaggagggtagccagcctccagctggtccacacccatctgcttgactctgctggagcagggaaggtctctgtggcctccctggtggcccctgagatgtttcctttctggccactgtggggctttcccctgcctgctcagccccaggaagcctcactgcttagcctgtgacttgttgctgtgtccacccctgctctggcccttctgtcaccttactgtctccactttatagatcctgagccagaactctaggccctgtttagaccaaggcaccattgcaaacagagggtctgcagacagagggcacagacaccccgtggtgcagaaggaatctcagacatgctggtgggctcgatcttggtactgatctgatttaggtgggttgaggagtcccctttgtaggctgtgtttccccagaacctgactatctcctcctggctgtggtccttggatattagtccttggcagactcaggtgagtttggccattggctctggggacccctgggggagccctgtggctctgggaggcagagagttcctcatattcctatgctcaggctcctccagggagccgtggcttccagccgggcagcagcgggttggaggccacccagttccctggacaagcagcaagatcccttacacagctagcccaagatggagtgcgtggccacagaccgtgtggctgccagccccagcctgggagttgcggtggcatgagctatcaaggcaggaatgtgactgtgggaaacccaatgccctgggcctggccctggggctgggcaagagtgtgtgtgtgtgtgtgtgaatgggggtgaagggtgggtgggcagaaaccagggcatcagcctctcctgcagcttggctctgcacggggctcagagtgggagcagaggcaaagcggccctccctgtcctggccttgtccacctggccaagcctttcctctaggctccagtgtgctgctgccgctctcccagttccagcaccctccttcccctcctccaggaagccttcctgaaggggcttccaaaggcctaccccattccatcccaccccacagatggcctcatcctggggtgtaagtgagtccacattaatccctttttccatagtaacatcagacccgactctgagcttcctgaaggtaggaggtgctgtctgatgcaccttgcctgtcctttgccctgggaccttaggcctgggtgctgcacatgtggcttagggcgagggaattctggtgattgactgcatgtgataaatcttcattggacgcccactacatgctcgatgttggactgggtgcaggggataaaggagtgtgtatgtcttgcctgcatacatggagggtagatgcaggggagaagctgggagaggctgggtaggggctgctgctgaaggctgggcagccaaggaggtgcccatacctcagagatgatgcagctaaggaagagcctgagttagctcatttgagaagacattccaaatggagaggacgacatccctgcataaaggccctgtggcagaggaaaggttatgaattcaagaaatttacagaaggccagaggagaggagtgttatttaacaagagcctagagagatgaaagagttaaaccaggtacctgccaaggaccgtggggtatcatttcattcagttttcactactagttctctacagggcacagtttccccgaacctggccacaggggacattgggcaatgtctggagacatttctagtgatcgtaactcagtggagatgctactggtatctaacaggtagaggccagggacgctgctaaacatcctacgacgcacaggacagcctcatagcaaagaatattccaggcccaattgccaaggttgaagagccgtgcattttccacagtagccctgtgtgggtgcttgtgaggctatgcgtgttagaatgcaattttcaacaggtcgggcagggatggcctctctgggcaggtgccactggccccgtgagcagcagtagccatttcacaacttgaatgggcaatgcctggcacagagtaggtgtttcgtaaatgggtggcacatcagaggagagactgacgggagggagatgcttccccaaagttcccagattgggttttcaagaggccttgttacttgctttgagagaaattccccaagcttgagccacgctgatgtccacacctgaaaaccagaatgtacttcaaaatcaagaaggcatgacattggcggatccccaccgggccggcctgtgtcatctgccctcctcaaggccgacacagttgtctttccctgaggcaggtgcccattgttcgtgagttcactcacttgttcaccaatgatgtgttgagcacctgctgcctgtgaggtgctctgctgggtgatgggtgcacgctgggcacctggctgggctctcagtgggacaagcagatgggtgctcgcaatgtaaagtggtgagtgcagtggctggggaaattcagggcgaagtgggagtgcccaggaggggtacctaacacatccttgcagggtgaccttgatgataagactgcacagaaacgtcaggggacacatggggcaagggcctgggggcaagaaaggagacctcagagtgttgcagctggtgtgagcaggtagggggtgtaggggtttgggggtctgtgggtttggtagtgtcctgactgccagagactcaatttagaggccacagcaggccaggagggaggggtggccttccctctgctcccagggtctaatggggatgtatggagagcccagtctcccctgggagggccagtggaccagaggatataaggatgttggccaggcgtgtgggtggaagtttgcccggattgtgaatcagggtggtacaaagagggactgagcttagtggcttccctcagcctggctctggggggtgtgtctcccctggtgccccagtaatacttcttcctaaaaatccccatctgtctccctgaggtagagggagaaggtcagcacttgggtggcagatggggtgagggtgggcagcaggcccctggaccaggtgtggtgtggctgggcccctcctctggagccaggtcaggttttggaacccaggcagtatgaggggcattctcagtgggagcgttggttcctccccctgcaggacagtcacttgcagggccagggactcagtgaggtccacatggaaatcccaaggagggagatgctgcttctgattgcaggcaggaggccctgcccttggacagagacccagaacgtgctgccagaacctcagacagaggccttgggagtggtgctgacaggggcccagtgaggggggccatctagaggaggtgcctggtgagtggggatgagcactggcagccatccgcgagcagggaggtccctgcaggcgctgggagggagagaggaaggatggggccctggagccggaggcgcctccctccctatgctcaccctagccccctacctgcgggtggggcacatgtgtgtggccggactgaggtagacggaccacagagtccatcccacctgcctgcagctgagtccaccccctatcctccctactcccactgctcccaccccttaccggtgccccagcagctagaggtgctgagatgcaggcatcacgcactgttgcacctgcgggctggccaagccctatttccagcgtcctaaccagctttccttagtgtccctgcctcccaagtctaagaggcctgctgggcctccaggtttgctttgcgtttggtgttgcacaccctgcagccaggggggtgttctgtggtcattcagggctgggcttggtgctccctccagtgggttgccagcgctgcagggccaggccaaacgcctctcctggcaggggcccagggcttccatacctgttcacgagggaggatttcaggcctttgggtccgtgagagagagcgagagagggggaaagaaactccatgtacaaaccaccactgcctggaggcactgggagaggctcttgctggtttgcttgattcttactgaaatgtccacttttacaccttggaatcattttcaacaaatatgagtgatgtgaacaccactcccagcacatgacaaactttatagtttatgacacgccccctccccaagccctgtgccttccctcgtaaggtcattgatagctaacatttcttgagcatttactgtgaaccaggaagtgtgctaagaactacatcttctgtatcttctttaataatcaaagcaactctctaaaatagatactgtataattatcccaaatttataaagtgattgattcagagaagttaagccacttgcccaaagtcacacagccagtagtaaacagcagggccagaactggagcccgaggaatctggtttcagagcccatgttgaagttgtggccaaaggaagaggagagtccaggcatctccctgtcagaaatgaggatgtcctgtggtggaagtcagagcccacccagggatagcaggaccttggagagtcccctgggagaatagagggactcagcctttcccaagtgtgtgttttgcaggccctttgcagcaagggagcagaggaagacccagcctaccttaggatgcaattcctttttgacccagagtgaccagggcaggctttgcttaggtgtcctaagatgatctgaagacggggaggcctgggatggttgacggcacctctggctgtggaacagcataagcttgctatgggagtgagtgtgtctgggacagctttaaggagcgtggtttgcctgaagccaagggccgggtttgggggaagaaagccttggtgtcggatggggaaagatagggcgggtcactgggggtctgaatgggagaaggctggactggacctttcaggccaccgaaggattcaggccgaggagctgcatagtgaccgagggtgatgaagctggttttggcttggggatggctggccagaggtgggagaacaggtgtctagggaggcttcttggacaaggggctctgggactgagtcttgagggtgggcatggtttggagagcaggggcacagtagtggcagtggtgtcttgtgttggaggcactggggggctttgtagcttcagagcctggggagaggttgaaattcttgggaaatggttccagggtgaaggtcagggtggcccagcagaagaatcctgggaactggccactctgggtgggatgaatgggccgtctgaggaagaggccagggttttctttcaagggtgtgtacacgtttgtgagatgtgggactgaacaaggaagtggagtagagaccgttttattacttaaccccacccctctgaaatggagcaggcgacagtttgggtagtgggcaggagggagaggagagaggcacatggagaaatttgagtgagtgcagagggagcagacagcacggggtgtctagtaacggccaccgactctccccagtccctctgtaggctgtggcttgggcttctggccctgggctgaggaagtgcatcggagagctgggtgtctggcccagggaagtggtccagtcttggtgctccccaaagtggtttgtggctcagtggttggagcccagtgctaatgagggcgaggtggcagggctgaccatctagctttatacacagtaaacagacagcttggcttccgagcctgactgtccacccactcctgtccccacctctgtcctcagcctgagccttgctcaccctcagcagagtgggaactggtgagagatggtgggtgtgtggtgcagcttcctccagagcttgggacccagctcgatgttagcagggggtggcagagatggggacccagagatgctagcctggaacctccacatttcgattccactggacttgtccctagtgggcagatccccatttgattctcccctggagagccccttcgggtcattccttctaatctctttgcctggaacaactaaaaattccgttctgactcatctggtcttcactagagagggagaagaatttcctacagtcctttggtgctttgacattggagtctggtgattttttaggagaggttgagctccccagaatgaaattagaggctgagagttcagctttcggcagcggagagatctcctggccctggggatctaactctctgggctagtctccctgccacccccaggcctgggggcagaatctgccataaccagcttcgtgtctccagggcggcgtgatggatgacaagagtgaagattccatgtccgtctccaccttgagcttcggtgtgaacagacccacgatttcctgcatattcgactgtaagtgaggcttcgaggcctctatggggtgataagggtgtgtcaccttatgcttctgtttggatggagttatacgatcagatgtgtatgtggggctctggggagctgagtctctgtgctttttggtgggtcagtgctgtgtgtatgtgtgtgtgtgtgcgcgcgtgcgtgcacgtgtccgtgcctatctgtgtggtgtgtccacccactcaaatctgagatcaggcatttaaggccctgcgctctgtggctgtcccattgtctatttggcctcccctcctcccctcttcctctatctcttctccccagccctaggctggcccaaggacatgttaattagtcaggtgtccgctttcaagctgtggtctgttctcctgacctcgcacagtggcctgtgtggtttccctcattcagcccctctgtctgctgccctttctagggacagactccacctccccccgagccccagctcttaaccactccagccactcactctggcacctctgttttttcccttggtgaagatgggaaccgctaccatctacgctgctacatgtaccaggcccgggacctggctgcgatggacaaggactctttttctggtaggtgggagagaggcaggagagtcagagactgtgggctgagatctgggaatggagacatctggctttcgggcaacaaggggtgctgtttgctgggtgcatggagatgggtgctgtcaccagggtcctgtggcttcttggtcgtcaggtgcagcaaactcttgtccatggcctgctggtcttcttggtaggatcaggcttcgctgactgtcccctctttcctgaaagccccttggccttggctctagccgccagtctctggagggtccctgcagcctcctccctgacctgctcctccttgatgcttcattgccctataagcctgatgctccaagaagtcttgtctgtgtcctctctctgggcaccggggtcccccaacttctccaccttcactcacctcagttcatcctgtgcaaacctccatgtgaccttgctccccagctccccccacccagatccaggctgcctctgcatttcctgccatggccctggggttggcagccatctgttacccaggctggaaattctcagtcacccagtcctgaggattctacctcctgaatccctctcagatctgttccctcctctttaatgtcacactgccatctgacactggccttgcccctttgtatctaggtcattctggttatcttctgatctccctggcaccttccacactgccccagacacacctggtcacatccctcccctgatttcaagtatagacactgacagataacctccaactcagcacagcagacaagtcccttgtgatgtaaccctgtggtcctcacctggttcaccttttgctcattgccctctatccagtagctccagccccaccaactctgtccacgttgcccatgtctggcctttgcactcagtgcgctctctgtctagaacacatttgctccctatttctaaccagcaaactcctagttatccttcaagacccagcccagatgccctctgacttccccaagccaagctgtttgctccttccctcagcacttggccagtgccttaccagcacctccctcagaggccttcccctctgcacagatcaacagtggtctatctctgccatctccttcctgctctgaccatgagctcccccaggaaatggtctcgtcttactttgaacctgcagcacttgatggctaaagaacaaacacttgctgagtgctcactatgtgcccaggcgttttgctgacactatttcatgtaacccttacaattgccctgtgaagtaggtggtcaacatccccattttataggtgaagagacagatactcggataggttaactaaatgcttgcattaaaatagctaccaagtgacagagcttggaagggaacccaaggctatcactgtctgagtgcctgctgtttggttgagtagaactgagttccatgggagtgacttcctggtcacagcagggctctgcagctgatggccatctgccggcttccttgctggtccactctcctccgcgatgtggggtccagtctgtgtccttctctccagcagctgtggccctcagtggcccatcctccagctctgtgcagccaggtgcggggtggatgaggaagttctaccccgttttgctttggggccagggtcctgagagctccctctgcaagtgtatatagcagcaacccgccagaatttacaggcccaggccagacaggcatctgcagtggctaacttgtcctgggaaacttgtccaggagtctgacgattagaacttactctgagaaaaaggacatggacgagtttatagccttgcttcctctcccttcccggaagggcgtgagaggtgagggtgccgggagcgggtttgtgagagggggatggccagggggggcccaggcagaagcccccttgtcctctgtgggccctgcgggccgagcaccctgcagagaggggagggaactcctccaagggcccagcactgggagcctatgctcccctctggagacggcattggtagggcagtggcactggtctgcggagacgtcacactttccatcctggccccaccccctcccccaaataaacatcccttgagctttgagggcactgcccagggcttcctcagaggccactggcttctgaatgaaaggcccgattgagcagctgctggaaaggaaaacagcagccaacatgggtgaacctataaaacccagagtgtttattttcactcccaaaccctaaaccaaagcaatttctcccctggaactgaccctggggcggctggcggccggaggctgtgcatggccaccggctggcatttctctgaggaaactcatgtgtgaatccggaatgtctggggccaggggagggcctggcacagtgtctgtcactggtgcagcttccagctgcctgccgggtgtctggggcagagagggccctccttgaaccactctcccagtgcctctgacctgtggctctctgggcctttccccgggggctcctacagccctctgctgtgctctttgcttctctctatatggtgggtctcggggctgcccggacattggggccatggctgctccttctccctggtcgaatatttgaggagataggcaggggttgcccagaaaacacttgttgaataatattgaacttgggagagggaggctgtcctagagatattgccatccagacggcctgagggttgcaccttaggtggggtttgagtgtatggctgggatatcaattctctggaccagtggaagggcatctgtggtatgtgcttgtgtgtttattaatgtgtgtgccctgtgcagcaattagtcataaaaaacataaagtgatacttaattcagtgacttcttttttttttttttttttttttttgagacagagtttcgctcttgttgcctaggctggagtgcaatggcgctatcttggctcactgcaacctccgcctcccaggttcaagtgattctccagcctcagcctcccaagtagctaggattacaggcacccaccaccatgcccagctaattttttgtattagtagagatgagatttccccttgttggccaggctggtcttgaactcctgacctcaggcgattcacccgccttggcctcccggagtgctgggattacaggcgtgagccactgtgcccggccagttcaatgacttctttttgttgttggggtggggttcccactgctttgtgaacatctgttgtatgtactgggtttgctttgaaatgaaaggctatgacttgagaggacttagaacacgtcaccaacaccacacctagctccgtcctgcccacccctttggtgtggagtgggtagcattgcttccctgaacggtagcctgagctgagttactcttcattgtagattggtgtttctcacagggaaccagggaagaaggtgtcaatttggccccctctgccagctaagaactgctgttgtggttggagggatcataagctctgcttgtagagctgcccgcccagatggaggaccctcaggcagctctatcatgaggtcaccacgttccattccaagggatgaccctcagcttaggaggggcccagaaatccctctttgaggccctcccaggtcactgggctcaggcggtccaacttggctaactgagccaatgagagatggctgatagaccagatgccacgtcatttattaatttacaggggtgagtacctctcaagaaagtagaaggtcctgtgccctctttgctggccttacagctccaggtaaggtcacagtggtgggccaggtaggtgatcctatgggatggtcctgccagaccaggctgcagtgaggtttgatgagccggagctgcccacagctggggccacgtcttgatgaccggtgccttagtttccctcagattcagactcagtcctgggtggtgctggggatttcttgcttttgggtttcccaagtctgaactccagtcttccttcccaacccctttttaagcacagctttttgttaaggttggctctggctggggcaatccaccagacgagcttaaggaggtgttttccaaagtgcattggaggcttgtgaaatgctccacttaaaaagggttcctgagtaagagagactgggaaacactgcacgcttcgggatttacaatgcacagtggcatatgagaggctctgaggcggctgcagggagggagcctgtttaatctgtttaagcactcattagctccccagaaaacccaccactcaaagaacacattttgggaaacactgatctacaggattccgtccaaattgctcagcaggaatccaggaccatttgtgatctgcccctcctcccctcctgcctccactgtccccactgccctggtgctcccttcatcccctcagccagaccaatggcttgctgatccccaagtgcctaaagtctttggtgtgtttacccttgccatgcttgcgcctggaatgcccccttttccttggtctgcacggcctacctcctcatccttgaggcctgctttgggaagcctgacttggtgccagcaggcgacatcaggtgctcctcacccctgcccctgtatactccactattaagtagcacatcaccttgtattatacctgtttaggttacaatttccaaccagtagtcacactcttaagagcctggattatgtctcattcatcttcctattcctagcactgtgctaacctcccacaggatagccaatcaataattgtatagtgaatgatgcatacaaataacgcaagagtgaacgtctttgtacatacatctagctttttggtgaatctggatgactcccaggaatatgggaaaagggtataaatggttttatgtttttcagggcatagtgcccaattgcttttctgaagggttgctgaattgcttccagcaataaaggagagtacctatttcatcaactctttgcccatactggctttttataattttgaacaatttttcttaattttataggaaaaatattgctggagtctagttttaatttgcgttgccttgattattggcaggcgatcccaccctctctgaagggccctttcctatgaggtggcatggtggaaggagcactggactaggagtcagggggtctagtacatacgatcatggccgagcgacttggtcttcctggggaaagctcccttttaggaaaactggggtgatacttcccactctgtccccgaccctggtggtctgagtggttggtgggaaggccgaggaggaaagcttagtgtattgtgaacgcagaaggtcctccccggagctccaggaaggttggagcagcagggctcagcccgaacagcctggtgcagggctctggatccagctaaggaatcgtctgcctgaggcctggtgataggtccctgactcccttgtggtgatgcagtgaggtagaatccttgtgtgctcatggctggatcctccctggggcagccgtggtcctcagagctgcaatccaaagtgcttgcctcagctagggcacgatgtgcgctgcatatggcttgtgggtgtggccctggggagagccctatgctgtgatgcacacgcaaaacccagcccctcaccttcccctccaccgctttttgggaatctgcctctccctcctcttagctttcctggaagagggatttgtctgtgagtgtgtctggctgtccttcatctgaccaccttgctctagcaacacccctactcccctttttcctttttttttttttttttgaggagtggggtcccgtgcagggagaggccaggcccctgcacacagtagcccagtgtctgaggccccaggcctccaggcctgctctttacaatgcctttgttgtgtgttttttcctcccatgggcgggtggggcacgtgtgtaggtctgggtgatttttgtttgaaagccaccccctccccgttctccccccagcgctgagctcattgcctgggctgatggggctgctggaaggagtcagcctgctcgggggccagcgtggggggtgctgccaacaccaatacagcgtgcacagccgctacaatgtgcaattgtgatctttgtgtaaacgcggtcggtctggggcccgcatgcttataaaaataaagcgtagggaagcacggggcggggcgggaacaaaaggggctttttcgctggctctctaatatggttttatttatcggaatgcgccctcctttccttactggaacctggagaggttctctgccgagcttggagctgatggtatcacagccagacggtttcattaaatgcacagatgcctctgggccctgccaggggcaggacggaaagggctcagggccggccctgccaggtccagtgcatggaaaggagagccccatgccagagaggctcccaccaggtaggggtgggcagttctctctggctccttcccctgccaagggcctcccattgccctcttctgttccacagaatcaggctcaaaaccattttcctgcaggaagtcctccatgatttgtgcctgatggctgtcaggctgatcccaggctggtggctgccttctattaaccagacccagcattgctcagccagtgggtggccatggctgagtccgccccttaacttagatacctcctgctcttaaaatcagctctttgggcaacaggtacaaccttggatcctgctctctccatcccttgatgggtttcctgccattgcccaccccaaccttcccacctctttcctggtcactccttgccagcccctttctctgccacctgtgcagtggccatggtgtcccatttggtcttcttgtggccagggagcctgtcttgctcttctcccctttgtgcggaagccctgtctccccatcccagcccctgggttgtgtttgaacctgcatccttctgaggccagcgacacagaggccattacctctgaggccactgaggccctcttgaggtcacaaggggagtgaatggcagtgctagggctggactgtggggctcagagggcacaggccattgcaggatggagtagggtgccaagggtattgagtgcatggttaggcactgggttcagccctcaaggtgacatcccattaggagaagctgaagggagtccccttctccaagccctgtgttcctctcccaagttatatgcactcagaccctctcctgcattggtttccaaaatgtggtcccagaaggcagcatgagcatcacttttaggaacttgttagaaatgcacattctccagcccaccccggccctgctgaatccgagtctctgggggcagcacccagcagcctgaatgaaccttccagatgatcctgcagcatgctcacattttcagaaccactgccctagagtctgctctagtgacaccaacttgcctttgggacaaggtagagggaatgagttgtggctgggtcccagggtggcgtggccaaggctggcaggctggaaaggagtttgggggtagcagggagctgcaggggcctttgggtttctcgcacacccctactgctaaatagctgctgagtctgtgcacttccctttagcaccccacacccatctaagccaccattattcctccctggaccactgcagtgacctcagaactggtctccctagacctcatgctccctccagtctgttctccatgtggcagccagagtgagcttgctgaaacgcagacctagccacgtcagtctggtggcatcccagagctcacagacaccagcagctctgctctgcttccccttcctcaaggaagccagatccctccctaacacatttcactgcattttatgtctattcttcaaggctctgacccaaattgtaattttacgttagcttgtgtggatattttatatttagttcaaattgtattctcagcccctagcacctagcacctagcctggcataaagaaggcactcaatacatgcttgctggatgaatgaatgaatagatgaatataccatacaggcactcacttcccccagctggaccctgcttccagcagccacagctcaggaagcggcagaaaaggggatgctctctggatcttgtgcccatttgccaggacccaggctccatgtccccaccgtggcctccagctggcctcatggtggggctaggagagccccatagggaagatgcatcccagcatgaatgttgttgctccagagtggcagccacaaccctgctccagctttgtggccccacatggctctggagaagacatctctcagggtccctgctgtgtcctgtctcccctccccctctccggcccatgcagatccctatgccatcgtctccttcctgcaccagagccagaagacggtggtggtgaagaacacccttaaccccacctgggaccagacgctcatcttctacgagatcgagatctttggcgagccggccacagttgctgagcaaccgcccagcattgtggtggagctgtacgaccatgacacttatgtgagtctgcccagctcctgcctcgtcccctcacagggagggaccatgtgcaaaggtggggtctccagggactcgtggctgcccagccagatgggtgctctcctaactccacgggccctagaacaattaaaataattttagagtcattaaaaatggattgctagcacagatgccgttcccacagcagacattgctcatcagtggaagggaacatatccggaaaaggcgcttggttgtgggtcaggggcttgggttttctctgcctctgcctcgcctgtgtgatcccaggccagtcccttcttctcatcgaggagctgcgtggaatccttaaatgtacatcaaacacttacgttactggctgagtggcccttcacttggggttccttgtttaggtgggagcccagacacccacacagtggagaatcctccatgtgagagcacgggtccccgagtgcctctcaactctgtgccacaggcagggcctcttaccacaactgtcccacaggacctcctgtggtgacaggcgagctctagggctgtgctgtccaaaaagggagcctctagctgcacgaggctgcccagcactggaaatgggactggtgcagctgagaaatgaaattgtaaattttatttcattttaacgaagtaaaattaaaatttaaatagctgcaggtggctggtgctcctgtattggacagagcagctctaggaggctcccaggagggagagagtgctatgggctggaatgtcaggaaagcctttgggaaagacccaggccctggaggaaatgtggggttggggtgtcagtgcgaggcagaggcctggaaggaggagaagggagtatgaggccaggggagcaggagagtgctgacgtcagggcagcattttccgaagaggaggctggatgctgccggaagagatccactgggcgcaaggtaaagaggcccggcctgcgctggaggtggcggtgggatgaaaggggaggggctgggtttggaagacattgtcagtaagagttgccctgaccagacatcaggttccctgggtgggtgtggtgaacaggggtgggggaaggtgctgctgtctatatgcctcaccagatggcaggggcagctggccatgggtaagctggcctgggctggggatgcaacgttggggtgcttggaaggaaaagctggtaccatgggaaggaatgagcaactggaggaagagtccatgtgggactgtttggagaagggcacaggccctggcaccttcggagcaggagggaggcaggcggcagggctggcacttctcggggggactcggcaggactgagtgcaagtgcagaacagggcgggagggcagcggtatgagctgcaggctgccagagccctgagggggcttgcccctgcatccagtgtgacagatctgtcttctgggcggcagggagttaaggaaagtgcctgaagaaaaggcacctgccttgatgaaaacatcattttgtccaggctcatttaatttgatgaacgtgatcacagtttccccatttgcaaagtgggtgggaatttaagggtgaaatgagcaggagatacagaagtccctggaactgcaaaaacctgtactgctgagcgcattagagaaatgccaggaggccgtctctctggtctccaatagtcttagcgctgattaaattgtagcagggcaaacactagttggacagtgttgaactgtccagagggacttcccgaccatgatgggaattcaaacctagtgacagtcaccacaggctgctcacagcttgttttgtccttgagtcctgctaaggagagcagaattcaccattctgtgggagggggtgcccttactactgaggccctttctagttcagaaggcacatgtagacctgatctctctgaggctccctagagccctgggtaagggatgctgattcttgtctctctacgcttggtctagggtgcagacgagtttatgggtcgctgcatctgtcaaccgagtctggaacggatgccacggctggcctggttcccactgacgaggggcagccagccgtcgggggagctgctggcctcttttgagctcatccagagagagaaggtgaggctggtctatatccagatccaggaggcccaggcaggagtggggtgggggccaaccctctgtgggagcctggaacacctcctctgaagccaggcctcctgctgagacccattttctgaaccctaagtcaggacaccatctaacatcggaatagaatttggggatcaggaatgtctgagtcctctggtcactggatttaatcttccttgggtcatctcctgacgtggtttctgggaggaggacctctgtggtctgattaagggagccttaattgccacaatgtgagggactccagggacaggcaagggcaggatccccgttgcattgctggcttcaccatgacctagcctcatggccctgggccagccactcccctgctgtaaaatgagaggtttgggttggacctgtaccttcaaacttcctcttagtatgatgtgaacccgaataagtagactgaataggagtagggctgctctgggtgaagtgtctggaggaatgggcacagtgccagcctagcatcccttctaccctcaaggaatagaggctgcaaaccatggactgtctgatcactgacatagtccatgagtgtcatgagggtgatgggggccttaggtgacaagcacatgaccagagctctcttttcttcactccagccggccatccaccatattcctggttttgaggtaagtcttgctctgacctttccttcttcaaactgattgccagtctccctgtgtttggcatctctctgggttaggaagggtggccaggcattaccgcgatcctgcctcaagcccccggggaagctctttcaagcagaggagggcccgggctggagggagctcaaagtctctgccaagctcaggcctttgctgcccttctctgcgaagtccaagaaccacagaatcccagatggaaggatcctcataattgtccagcccagtggctttcagctggctgagcattagaatctccgggacagcactgcccagggaatcttaatgcacatccaggactgagaatcactgacttagccccagggttctgaaagtgtggcccattcttgagtcctacttcaagcccactgaagcaattctgagggcagcccagcaacctctgtatcaacttgccctccagggccttctcacacatgcacgagtttcagaagccctgattcagaccacatttcccactgaattgttcttaccaagacctcattttctttcctcttcctggacgggggcttcattcccttactgctgctctccttccttcttctggaggtcttggtagaaaatgttgagctttgactggtacccaggtgcactggatgcattacctgattacatgccaagttcagctgcatctatgagaagtagtcatctgggctgtgtttggacacctccattgtccttcacaaggcagcccacacaatttttagagagttcttgggaggccctcccttcatgcaagccctccttcaccagccctgcccctccagctctccctccctgtcctaagctcctgctctcagtgctgcccgctcctgggggttctaggttggttctcctcagcttgccaaggccacaggctcccaagcccttcccatcacctgctgctcttctctttccttttgttgcttccagagattcctggcgtccaggcttatgctttagcctttcccagcgtccctctgcactgacatccatcacaccttctttcccagggaccactttaggggcgtggctgggaagtgcatcattcttacccttggtgggaggtggtttctgttggctcctcttagtggtggcatctggcatgctgacctctggccccgcctagtgcgccttgatactaatagagaactttttccccttccaacccctctcaccatctcctggatgtgccacatcccatggctgtgggccaggtgcaggagacatcaaggatcctggatgaggtgagctgggcgtggtggttgggatgggtgggccgaggtagagggaaggtgaagccagccttcaagcacacacctggagccttccaggttcctggtgcccagcaggcatctgtcacatggagacctgtctggattttattccccatgctgtgtgtggattcagggctgcccagagtgtgtcctgggggtgatcctggtctaagaaggcttgctgtcctgctaggaggccagatttcacccagacaacatgaatagcaatacagattcttaaatgattaagtaccaggtggcacattttgaagaataaattgtttggaaggggccagagtagtcaaggaagcctttctggtggaggtggcattagtcaaatgtctttatgcccatcagcacttaggaagaaagtgagaaacatggctttggctcaaaaggccaaggaccagtttgggtcctggctggtttgggggatggggcgagctggggacctcctagggacgggaagaagtttagagtttgcatttagataaagcaaggctgcatcctttgccatgggaggagagatgcacgttccctatggcctcctgtgcatctgtgggtggattgtcgtgagccaggccagagggtgggtggcagagacctgggtggagagacaggaaggagagccctggtcagatgaggcgttgggaaaagggcagccacttcctgccattagggaatccccagaccgacagcggacactatttgacattttcagtgtaatttggacttgaagtgcagagtcaggatgtgggatccacaggccccgcaccccttacctcacttccttttgctcccagaccgaggtggggtccgccaagtgagctcgctgtaattgcgcctgacaggcggcctcctgcttctggctgcagttgcaaaagactgccgatttggaaagggaggtggagtcctgtccagggaagcagcacggagccctctctgttgattgagtgcactttgtggccaaaacccacagcctgctctgaagaagacccagcccagggatgagttattaaaaaaaaagttaaaatccttaataactggattcgtaatatgtaacagtgaaggctcagattccgagggcagggatctggctgcagtctcgtcagaaagcaaatcaaaactgcagctcatgggccagagcccgaagagcaccgagtgccccctgcagggccaagcaggctgcaggctgagggtgggtgtgggtcagcagggccaggggagagcaagtcctaggagtgtgctaggcacagggctgggccaggccagcaggttcaaagggtccaaggaggacctatcccagtgggatgaatgatctgctggtccagggaccagccccagaagatgaccttgtgacctccctcagtcccaggggatagccctgggacccctagctcagcccatgtccttctcacttgaaggctaagcctgatgccaagatgctgagtcctcttcgctttaagaagccccagggctgggtggtccttctgttgccactggtcctcctgtaagtaggaccgcagcagggtgtttctgtcttctttgctgtgaccaagctcctgccttgtatctcccatctggctgctcccaggctcctggcccgatccctgtgaagagtgctcaagcctttctggagggctgggagcctcctcctgagcccctggccatgggagcccatgagagtcagggggcagtgagggaagatgggtgtgttggggagctgtctggctgcaggaggtgtgggtttgagagactagctaggaggctcttgagccagttgagataggggcctggactggagacaggccagtaggaacggatggggcaagtgactctgaaggatggtttaaggatatcctctcttgtgggaagtgcctttcagctagcgcagccaggtgcagagatttccaagccacagtgcctgtgaatgagatgaaatactgtctgcccttgtcgaaggctcccagagcaggacagtgagggtaacttcctggaagaggtgccactgagctagcttttgaagttgggattggtagaaaatgtggggaggtggcccaggcagcagtgtcttgggctgggggcatgtcacctcctggatgtggcctgttggacaacaaacttcccctctcccaggctttatgcccatctgggacacctctctctgcagctcttggtcaggaagtgaggctgttgcatggtgtgtctgaggctttgatgatgtccgggagatctgggtcctcgcagacagagcagatggagggaagggtttccttttcgctctccggtctgcattttctttgtctttccctctcttcctgagtctcttcccactctcctttcgtgtttcactcttcctgtttgctccttggccccagcttcctccttctccccgcctcttctgagccctctgtctggtttcttttcctttttgtctggagaacaaaggcagtccttgctgccaaggggaatgagttcaaagaaactgcaattttagatttcctgagaactggagaatgtgtgcatgcacgtgtgagcatgtgcgagtgtgtacactctcgagggcacacacatgcacgcacacacagcagctgaggtgatcgtgggtccctgaatgcccagggccccctaggatacagaacatgtgtagaagaagacccatggggcttgtgatcctgaccatttcggggaggtggggaggggagggggtgtggtttagagaattacccttgcttctgctgctgctctcctgctggggcaggggatgccctggtgggagggatcgtatgctttgtggctgattttactgccagttcaggggtgggggccaccagataccactccatccacccatccaggctgcagggtatatggcttttactctaagatgtacccggggtactctcctgtacccccaagtccactggaaggaaaaatttggtgttttgcaatcaggaaaataaagccagtggtcccccatcccccattcctcccccaaggccttaatttaaaacactgtttttcctgggaagtgtaattagagcaacatattgttcctaacgagctgggtggggcaggcagacaatggagccctcccagcctgcctggctgccccctgcctggagctccccgaggaaccaggatgtgactgcagcgtcttctgtcctctgctgggtgaggtgagggtccataggctactgatgacccggctgatgcaggaggcttgccaacacttcccttgccctgggagcgactcctgtctaacatggtggcccctagactgggctgggggtgcccctttcatggctcagggccttggttcttcgtggtaaactggccagcgggactgatagactgaagtgggcttgaggatggcttcagctctggtaggggagagagcttcacttgttcttggggtcttcttggtctgggctggcttgatcaacactctgcacacctgtagaacccatctctgcagccgcccctggtctgccctgcatttgaagggagcaagacgggagctggtcaaatgtggcttcctctgattaggcttatcagagtcctccatcaaccctaggacagtgaatcaggatgttctggtggcactttcagtctacaccccatctgcccagcagtgctgagaggcttcccagttgcagtgagggtcgcagcaccctcactgagaattactgtcctggagagggggtgctgtgcccctcaagtgggctggaccagaaaaaaagttgaaaaccaggctcaagagctggcagagacctcaggactcctgcctgggagatgatcagagatcccttaggaccataggaatggggtatgtggggaaagggtcatgtagacggggttaagagagtcagagtcaggttataagacgtttctggagcgtcttggggagattttctagagaccttgaattaggccctaaaaatgggttagattcagttggcagtaaagaaagcccattgaaccagagggagtaatgagcaggcctggggaggacccagggtcaggctagagcaggcacgggtgctaggaaggaggacagtgcgtgttggattcattcctttatcctcccatccacccactcttctgtcttcaccctccctcttccccttcagttatccattcataatcatttatttgttggacgggggaattcagctatggtccctgtgtacagaattgctggtttaaccaaggacacaatcaaatgaacacgtggagatagcatgggtgatggattgatgtgtctttctatgggaataagtgtaagttgctatgggagctacgggggtacttaagcttggggcaccaggaaagatttaaatggacacctgctgtctgaataggaagtacaggaggagtaggggtagaagtgcatttcagacagagggaccactgagctccaagcctcaaagctaaaagagcatggtgcctcctgcaacctgctagcattcagaagggcaggggttgcgtgtgtcccaggaggtggttcatcactacttggggtcatcaaggggaaatttatctcatgagagacatgcccagagaaggcagcaggagctggaagattagaggtcttgtggaggctactttgaagagtctgcacttcatcctgagcagatgggaagacattggaggacttgaaacaaagagtgacattattagaaagcctgccttggctgcagattgtagaacgcgtgggctgttgggagagggtgtcaaaaccaagtgaaagggggatgctggtgaatccaggcaagagagggtagtggcttgcactgagcaaaggagatgggtgggcgggcgtgagagatgttcaggagacaggattaccagtgtttggtgatcagtcaggcagggcgatgaggggcaggaggagccaagggtggcgtgggagcttttggcttggttgtctagatggtggggtcagacttgaagagagcaggttctgagggggaagatgaagaatccagttttggacaagttcagtgtgagaggccagtaggacacattaatgaactaagcagtaagatattggggcttagcagagatgtttgggagcagaaagtctaggagagggctaaggagcagatcagggcttggtggaggaagatgggaaggctgcagaggaggctcagcaaacagggtgagggccagcagtgtggatccagagagactgtttgggaaggagatgaggttagctggccagatgctgctgagggggtgagagagagaagagcccacgagtgtccttcgggtaggggactctggagacaaatttccggggaggggtgctgagggcagaagcagggtgcactgggaagcaggtggtgtggacatgagggaggagaggtagtggatggagacaggattagagagaggagaggagggagcctgcagagaggagggcgcgggtggatttgggagatggggatgtctttaaattgggaaggagcagatccaggagatagtgtgaaaaattggggaggagcatttggacgcatggtcagagggggagccacagaggcaggcaaccctgggaggtggcaggaaatggcagggaagaagcatgtcctgggacccctggggacagcacggtggacagagatggccttgggatgcatgctgtggcctcatgctgaggaagctgcctggacacacctctaaccactgtctctgcctgtctcttccttctgcctccgctgggcccgacgctccgcagctgtgtgctcctgccttcttcctccagggccttctccaaacggtattggagcttaaccttctccaggttcttgttcccctgtcctcagcaagcaggctcctgaagatgcggagcctggtccccagcctttagagaggaatgtcatcaccacggagctcgagggagccccgagggacagaccgaggaaatgagggataaagtggatactgcccagcgtttgggggcctagagaggaaatattctgggaggaatgtattcatgagttttccttagtgattttaagagaacaagtgtatgagaaagattggtctttctgccactccactcaggggatcctggggctgttccctccctgatggtttttttttttggcccctctttgtcttgggtttttggctctgggtccatattgggttgggcatagccataaggggccatgaacagaccacaagcaggcattcaagtgcaaccctgtctttaaagaggacaccctgctgtgctgccacctgcagctggtggccttggagtgcccagggaggacatcaaactgggggtccccatagcagccaggtcactgcagaagctgtgtaggccctgcctccatcctccaagggcacctttcatgtggactgtgacatgcatagcagcccctggagctgtgcactgcagcagccctgtccatcacccctgcttatcagacggtcaggaatgcaggtgcttcctgcatcatgtcacctgcattgtgggtctggaggaaaatgataagtttttttgctttatgccctggtgacttagagatagtaataaagccagtgttgctctgaaagatgcttctaatggctcagctctcttgaagtcaccctggggagatcaacaccaacaccaatggcaaaaacaatggtactaacaacaattctagtaatagttacagtcacagccatttactaagcgcctcctgtgtgccaggcgctcttcagatgtgttctctcatttaattctcggagcagcttatctcagatcttcatctgagaatactgagtcactgaagttgagtaatctgtccaaggcctaatggcgaggaggtggcagagctggaactagagttgaggtctgattctaggactaagcttccaactgctgtaggttgggggaaacatggtgtcatcagggtgtcgctgcacaggagtgtggcttgggttggctgtgaagtgattcatggaggtggggggaagctgatatctttctctgctttgactgctcccaccatctatggcagagcgtctgtatggatgtaccatcctcgcagaaggaacccaacagaagtcacttggagaatgaatccaatgatttcattgtttaataaatgagattacatgaggcaagctctgtaaagtgtctatcacagtccttttaattatagttaacatttccggagtgtcaggccctccatgtatggatgtgcaggttgggcactgcacaaggacactgtgtctaaggggctgcatttctagcacagacaccatatacttgtatttattataacaatttcccaataggtggcagtaaagtgtcttgttctaataaactcagaaaatatgacaactttctgacatggaagtaaagagtcttaagcacatttttctctaattgtcacaaagacaccacatgggctaatagtcctgttgaaggtttacatgaagctctaaaggttatacaggtattaacttcctcaaccctcaccctaacctttagaggttgacaacttttgctaaccattttatagatgaaaacattcagctataggaggtgaaataatttatttaacgtcatacatagtggagttaggactcacacctgtgttcctaactgctgttattggtggttaactatctaaggcagtacctgcctcccttgccccaccttgcttcctcatgtagttctttgtgatcattgaggattcctgcccaactctttctggcaaactcttagtaggccagaattgacacacacttgctcgtctctgtagtggagagagaccctccccagcagtgtgctttggtgctctggggagccccttctcccattgctcagttgttctctttctggctcacaatgcaagtattctgtcctcacaggggacaggcgtgagaggtgggggtttggggctggaaggtgtctaggggtggggaagaaataccaggacagatgataacccggaagggtctgagccaggaggcaggagaaccaggctggcgggcaggcacatggtcctctctgggactgagaggggctgaagtggatctgccaggatggaataggcagtgtgtgcacgcatatgctgtgtgcgtatcagggaggggcagacccggagcagctcagggggcatcagagcctgcattatgggaggaggggtgacgggattcagttggaacaaggtgacctgaaccctggatgaaggtgctggaattgtgatcctggagaagatgatgcctggccgaaactgacttagctttttcgtttctgcctccctgtttgtccacttctgtctttccttctctgtttctccctgcacttggcatttctttctgtcctatctgtccttctctcttgtctttttgccttggtcttccttccacctttgtctccattctacctgctgtccactgcagtctgaggacacagacctgccctacccaccaccccagagggaggccaacatctacatggttcctcagaacatcaagccagcgctccagcgtaccgccatcgaggtgagccgtccgggcctgggcgtgggggctgggagcagcctgcccttccccttcctggccccagcctttcctggggcccggggccttctgagccactctcctcattctgtgtgcttagatcctggcatggggcctgcggaacatgaagagttaccagctggccaacatctcctcccccagcctcgtggtagagtgtgggggccagacggtgcagtcctgtgtcatcaggaacctccggaagaaccccaactttgacatctgcaccctcttcatggaagtggtgagccccacctccctactgtccccttccagagtcctggggctagaagttctacatgtccccgagcagcctggggcttgtgctccaattccctgcgggatccagggtaggacccctcactttcctgtgaacatggggagaaatgctcataccctcctcactggaagggttcaggcctctgagtaggacaaacggggccaacctgctcctcctatacccaaatcctagatcagcgaaagtcccaaggagacatcccctggctgttgtccctctgggacaggtttcagtcccctggagcgcccttggggacctgctagggcttggctttccaggattcctccaaaccttttctgaccatgtcctcccccagcctgggccccctcaaaggagctcacccccacagccctcaggccctccaggcctctccacctccctgggatgcctagacctagtggccagagtaaggcaggtctgaggaaaagaaaatggtttgcaagatgaaagcgctgtagaaattccaggcccagtggctgtcaacagaagcctcctcttggccgagccaaagccgcccctgaaggagagcatataaattatttcaagttgtgttcaaagtgcttttggggtgtgtggggggaagaatctgggtctgtaagccaactcttgagtatccacttggggggactgtctgtaagaaatgttgagtcccgggccaactcccctcgcccgctccccagccagtgagggagcgcagcctcgtttccacttcaggctgaacaggatgcatttggaaggtaaagctgtggggggaaagccggcctctgcatgcagcattcaaggggccgacagaaaaggtgtgtggcttcgctcgactgcccagctctgggccagccaccattttggatttctggctgtggggattatctgcggtttatagtcattttctgctctttgggcttgacctggagacttcccagagggggattcaggccagtgcgttcttcctcctccacccagatgctgcccagggaggagctctactgcccccccatcaccgtcaaggtcatcgataaccgccagtttggccgccggcctgtggtgggccagtgtaccatccgctccctggagagcttcctgtgtgacccctactcggcggagagtccatccccacagggtggcccaggtaggggaaggggagatgatgggcaggtcagggaagggggagcctcagggccaagctacccttcctagttgagatgcatcctgaaacccttctcttacggagacctgaatgagaagtggtttctgctctgctagaccacagggtggagaccttccttagggcagagcctagctctgggtggggggcaccaggagcaggtgactgatacccgttggagctgaggggtgagggctcaaagtgggcccagggggagggagagagagggcagggagacaatgatgcggggagggaggaaagaaatgtgaggagaggaagacagaagtgggagacagagcatgtgaaggaggatgggagagatggagatgagagagggacttattgggaagtaggaagagagagataccgactgagaaatgtggagagactgcagggtcttgtcttggtcccttggttgagccctggggctggtgaggggcgagccttttgagagagcccctctcaggcctggatggctccctcccctgcagacgatgtgagcctactcagtcctggggaagacgtgctcatcgacattgatgacaaggagcccctcatccccatccaggtaggatgggcatcctccagggaggcctgggtcacctttcccctccattcctcatcaattcccaccccttctcccctacccttcattatcacacagcctctatacacatccccttctgggctctgcggttggacactgtccagtagagagacccagatgggagctttcagtctggctgaggggggtggggtgtgctcatctgggcaagactcaatcccttttcttggatgcatatgtgaaaaataggccatctaccctgggggccatggtgagggctttctcctggagatcaccagaaaatcagggtgaggagcaaatgagagaaggacgacaggggagggagtgagtgggccatctctggggtcctccagccccatctccctatctgggacaggccccttcttagggggaaggttgttctgtgggcttgtgcttggtggctccttggagacagcttagaaagaagaggctgtgtccaagccaagagtctatctcgccccattcctccatctgcagggaaaaggaggaaggaggcagggaggggccttattctaaggtctccagccctgggggaggtaggagtcttccttttgctgcatactcagcaactgagggccagcctgtgatgcagatgccaatgccacagagcatggcaggaggtctgtggcaccttgtgctgaggggcagcgctcccccgactgtgggccatggagtggctctggattctgtagggttgagcccatctggtccttcccacagtagacatggagaaaggtctcactgtgagcaccagccttgaactcaccatctgttccaggttgtcaccctcctctctgggctttgcaagatactggtcatacccctggcaccctggggctcccagaacttctgggccacccagaggcagagcctccaggcctgtatagacaacacctgtgtcctcgggccttgctgcatctgtagtttcactgatgctaaaagtcctcagaagccctgtgttccatctctccagcctctgtggctctccagggttctgccctgccagcctttctgctgggaagacctcctgccccctgtcccttgtccaactcttgatcattgtttaagacttaacttaggcatggtcgcttctttgggggagtctttcctggctcctcttctcctgtgagacttgcctatctttgggtcactgtgctgctctagggcctgctgtctctgtcaatgttagcatattccccaggctaagctcaggggagcaactgcggctccttcctctttgtattctcaatgctcagcacaaggcctcgcttagcggaggtgttaatgaaagtctgtctgtcttggcaagtgggtagatgggtgcatgggttgatggatggatggacgaattttctggctactgtctgtatggatctgaggaggaatctctctcttggctggggaaacccaaatggaaatttcagatgtccctatgtgaaatttagctaaactcagtgctagtgcctctgggctgcttgggtgtttatagctgaattaggcagataatttgccccaaactctggctgcctgctcctggctcctgtttcccggctgctccatgggcctgtctgagattgtgcagggaagtgcagggcctgcccagcaggatttccgttctgtgtgtgctgccctcaaaatgtctacacactcagatggggagggactattttaggtcctgctggccacaagcacagccagaggcagacgatgaggaggcccagcctggccatcctcccggcgttgacatgagggaactggggctgggatctgagccagagctgggcctgtgctgtttgtgggagcacacggccactctggctagagctgctggccagaccagcagcactggtgggagctgggatggggctcctggaggtgtacccacctggggaggggctgggcctcccctggcctgggacaggggaggaggaggaaatgacactgatttgctctgatgggggaggcttggaccttgccctcatggagctccctgtctgatgaaagagacaaaactctgttctcaaaagcctcaaacccagcagggagaccagttctgttctgcagggagccctggccctctggggaagccccttttctggtatctgactttgttccatgtttttctctgagatctattgctctgatttggctgatccaggaaatctttcactcactcgcctctcctccctgtccctggcactctgaaggacaggcgctccaaggccaacccaggaggcagctgaccccgggtgcagttccagtggtttgctagataactatggctgggctttcttcctctccctccttccccagtgcagatagcatgaagggccctggcttctggggacaggagggacgagaggtctggcagaatctggattttggctggcttctgtctgccccaccggtgtttctcggcagcctgttccatcctcacagttgatgcagccctggctggtgctggatgtgttcactgtgtcctggctgtggtcctaggacccctcctagctcaaacctgctcttgccagagttacccttccatcttggtcccttcctgtcactttcctccgtgacaccttctctctgctcccaaagccttcttaccagcatctgcctaggtcctgggatgagctggccacacatttagaacatgtcaccggagacccttgcctgatgttcaggccatgggctggcactcaccacggagtatttcttaggtttctagaaatgttttggtttgtgtcgagagtggccaattctggaggtgactcaaaacgtgtataaggcaggtctgtgctcagcatcccagggctcgtagatcagtgtctgtctctaagggtaagggtggggggccctgtttagggggtgcctggcctgtttaaactgttctccatggtgatgaggattgggatgagaaatactcacacgtattaactccaccacttgttcttggtctgtgcagccatcctatgtgtagactttagagtggcagactaggggtgggggtggtgtgtgcacatgagtgagcatgacaggtgggggtggtaggagcaggtgtgtgcacgagcttccatgggtgctggccagaggtgtgtctaagcttggtggtggcattgcaggaattgtggccttgactttgaactttctgagggcaggcctgggtgtgtcctcacacagggagagcagaagtgtcctattccatctagttctctgctttagaaaacgatatattcattttttcagataataaaatgatacgtgttcattatataaaatttggaaaatatagaaaaataatgaaaaaatagggcttacctccatccaaacacacaatttgaatgcactgcacccaacatttcattgtcattctttcctcttctttttaggtttctctttctgtctctgattctgtctctgacttcatttctacctttaaaataaaattaaggcctttgttcactagttgttgttgtttttttattaaggcagttcttggtgttatgattatgattaggggaagaaaaacagtgttcaggaacacacagagagcctgccaccccctgtccatttcctatagagggtcttgaagctccaaatagaggctgtgcccccagaaatcgcacctttgaggcactgagatgcccccagagccagctgggtatggcaagggcggctcttgcttagcattccgagagagcactcctaggtagaggggctcctcttcaagtcctcagagaaggagaatttcgggaggtgggaatatgtgagtgttgaagaattagagaaataacttttaggaagttccgactctggtcacaaagagacaagggatgagggggtgtccagaagatctcaaatgagtgatgtcaaagtgaggagatgtttcattaacaaggagaccaaactcttggagtctcctggccctgcaagttcaccataggctaagcaaccagggaagcttctccgggaaggcggcctctgaggcgggtgggtgaacaggggaggacagggaggctttcctggcaggcaaaagggctcgggcaaaggcttggaagtgggactctgtgtgtatgttttatgtggcaaaggggtacgtgtgtgtatgtatgagtgtatgtggtagaggtggtgtgtgtgtgtgtggtagaggtggtgtgtgtgtatgtggggtagaggtgatgtgtgtggcagaggtggtgtgtgtgtggcagaggtggggtgtgtgtgtggtagaggtggggtgtgtgcgtgtgtggtagaggtggggtgtgtgtgtggtagaggtggtgtgtgtgtatgtggggtagaggtggtgtgtgtggtagaggtggtgtgtgtgtggtagaggtggggtatatgtgtgtgtgtggtagaggtggggtataagtgtgtgtggtagagatggggtgtgtgtgtgtggtagaggtggggtgtgtgtggtagaggtgtgtttgtggtagaggtgtgtgtgtgtggtagaggtgtgtgtgtggtagaggtggtgtgtgtgtttggtagaggtgtttgtgtggtagaggtgaggtatatgtgtgtgtggtagagatggggtgtgtgtgtgtggtagagatggtgtgtgtgtgtgtgtgtggtagagatggggtgtgtgtgtggtagagatggggtgtgtgtgtggtagaggtggggtgtgtgtgtggtagaggtggcgtgtgtggtagaggtggtgtgtgtgtgtgtgtgtggtagaggtggggtataagtgtgtgtggtagagatgggatgtgtgtgtgtggtagaggtggggtgtgtgtgtggtagaggtggcgtgtgtggtagaggtgtgtgtgtgtggtagaggtgtgtgtgtggtagaggtggtgtgtgtgtgtgtggtagagatggggtgtgtgtgtggtagaggggtgtgtgtgtggtagaggtggcatgtgtggtagaggtggtgtgtgtgtgtgtggtagaggtggtgtgtgtgtggtagaggtggggtgtgtgtggtagaggtggggttgtgtgtgtgtggtagaggtgtgtgtgtggtagaggtgatgtgtgtgtttggtagaggtgtgtgtgtggtagaggtggggtgtgtgtgtgtggtagaggtggagtgtgtgtttgtgtggggtagagttgtgtgtgtgtggtagaggtggtgggtgtggtagaggtggtgtgtgtgttacaggaggtggtgtgtgtggcagaggaggtgtgtgtgtggtagagggatgtgagtgtgtgtgcgtggtagagatggtgtgtgtggcagaggtgggtgtgtatgtggagtagaggtggtgggtgtgtgtccgtgtgagtgtgttttttgtgtgtgtggtgagcgtggggtgccagcaggagacaggcctggcctgctagtgtgcaggaggcctcgggagactgtttcctcactctgtcgggtgggtgctggggctggccggctctgggactcccaggctcccaggctcccaggcgctggggctggggctaattttgagcctgctgctccagttatagtctctgggatgccgtgaaggtgggaacgtgctcccagaaccggagtggcaaattatgcccgagtcccaaaggggaacgtgtaatttctgaagctggaccagatctttggagcactatgtttagctttattttgctctggtgaactgccggtttccctctcacctttctaaaaaagaactgcattaaaaataacagtaaggcttctgtggggttcaggatgcaaatgggaggggcagagctgctgcctggcgaggcccgtctctggccagctaggggtggcacgtggagttcacccagtctattccaggggtcacacgacatgtggccagcaccccagggccatccagcagccctggctaggtgcccaaggctgattctgccctcctgcgtatgcttctggctctgaacagccctgaggggcccctcagtgatgtgtcttttcacagagcagggagggatccgagtccccaaacgtccctcctgggcccagcagggcttcaccttccgtgggtttctttgggcatcgggggagtgtcttccaggatcttcctgttgaggaaggcagggcagcctggggtttcgccccttggagtcctcccagagccccctgctcaaggcttagaggttgaggggccagccccggcagctctgggtcctagctggctgcttcccagcacctaccctcctgacccgtttgctctttctcgaacgggctgtgcttctttcttcccctctacctttgcgcttgcgattccctctgcctagcatgcgtcttctcaccttgcccacctgctagcctggtactcattcacccagagccccatccccttatcctagagtatcgtagtggtctctgaacaagtcttcctgccttcagccctgagccctgaggccctcctcaggctgcagcccaaggattcacagtacagggagattgattcacagtactgggagattgtaggcaaggagctgatgctcagaaaaggatgcagaaagtgatttgtagcatggagtggaggtgggactataagactcctaaagtccccactgatgtcaggttttggggaagacatatgatgccctggttcttgtcctggaggagggaagactgagtaacctgctgtagctttgggaaccatgccctgcagtgttggtgtggctcagaggttaggatgctggggttggagtgtccctgaaataggcagattttggagagggagggaggacatatgagagagtgggcaagagtcaggcattggctgagccccttccacgtgccttgccttgtgctgggcgtgcacagccttcgtctcattcatactcactgtcgccctgtgaggtgggctttgggcccattctccagataggacgctgacccagagaggtcaaggggcttgctcaaagtcacacatctggtgaggtgttggagccaggcttgtccaactccaaagcacatgttctccctggaggaagagcagagggtgcctggtcagagagcgctacctcttggagactgtccagccttccctaaagtgggttctctaatcctgttgctaaccagcatgtttcatttgtagcttgcagacggtctgtcgagcttggcccccactaacacggcttctcctccatccagtcctcatgtatgtactgtttacttatttgtgggctccttgtattcccttgtggggctgggggtaggggggttaggagggaaatgggaggggagagtgggagggaagaaaggaggtatttcctgagccctagcagggaagtcacctatctttgcctcactgaaaaggaggggtgagagaaagctatggagtagatgctcagaaatggacacccctaggttacttcctgggatttaccttatttacctgtgtgagggctgggggcttaggtggggctgcatgggccagtggaagcggggaaatctctcaattagactctgacttctggagtgtgggaccccagaaggctcttctgggcgtgggacctcagacggcaggctgactttctgtgctcctccctgatgtgtgaaggatgtgtgtgactgaggaaccctggctggcccctcgggtgctaagaggtctgctggggccaacagtctgctcctgcagtttccagcagggctcctttctgcttgcctgagtggattccttaggtgtcatctttctgggctgtgggtccctctaggaagatgactttgatgtctggccttcagcatgcgctcctgaagtcccatggtgagggccagtgggagcccctgacctgtggagggtggcgtaagagacagaacttgctaaaggcagcgagttacattctacttatggtgtcaagaggaggcactgttgtactgggggtctcatgagcttctagaaggaggctatcgatatacatatttttttctgatttatctattttaaataaaatatggaaaacacaaaaagtgtcaagtaggaagttaaaaccacttttattcctaccagtttatgataggcactgttagggttttgatgtgcctagattttttagatatcttttaaactcacatgaatactttttaaaaacaaaattggaatcatacttttttataatttggattttttaaatttaaaagtatatatgaatatttttccatatttgtatgtgtgtatatataatatatgtataatatgtatgttatgtatattatatatatattttttgagatggagtctcactttgtcgcccaggctagagtgcagtggcatgatcttggctcactgcaacctccatctgctgggctcaagcaattctcctgcctcagcctcctgagtagctgggactacaggtgcgcaacaccacacgtggctaattttttgtatttttagtagagacggggtttcaccatgttggccagtctggtctcggactcctgatctcatgatctgcccgcctcggcctcccaaagtgctgggattacaggcgtgagccaccacacccagcctattcttatattctttaaagatatgactgcatgtcacatgaacattcgtaaacttttaactactccctatcatttgccatttaatttgtttatttctcctattgtcttcttttgtcccttaaaggacttattttagttcactttatatatgtccattcagatgatttctttgttttttttttttttttgttacgcccaggtacatctgttcaggccatttcttgttaaagtgtattcctaggcattttatggtctttggtgctgttctaaatggaatatatgttttcctcatgactttgtcgaactatcgctagaatataggaaaacaatatttttgtatatttactttggaactgactctttattaaggcccatttattagttctgactattgttaattgattctgtttggttttccaagtaggtaagattgttttcttcaaataatgataaacgtgttagtttctttctaatagtaatgcctcattcctttttccaaataccatttgatatttgagatgctgctgagcagacttatttagtcattcattctaatgagactgcctctaccagatttccattaattgggatgatgattgatggtttcagacagatatttgattttggcaaggttgtgtcctttattgtttgtttgtttatttttttattgtttttgagatggagtcttgctccgttgcccaggctggagtgcagtggtgttgtcttggctcactgcaacctctgcctcctgggttcaagcaattctcttgcctcagcctcctgagtagctgggattacaggtgcccaccaccgcactctgttaatttttgtatttttgtagagacagggtttcaccatcttggccaggctgatcttgaactcctgacctcaaatgatccaccctccttggcttcccaaagtgttgggattacaggtgtgagccaccgcacctagctgattgttagtttattaatagcttaaaaattagtcatggaagtttaattctatcaaatgtcatttggcatttattaagatgataattttattttccattgtctgttaatatagtgtataattgtgctatattcctggggtaaacccaaatcggtcaattggtcatggtattatagtttactacagttgcagccttcttatccaatgcaatcgagacaggtagtcgattggctaattgataaagttgattaaatagggacttatttttttttttaattgtactttaggttttagggtacatgtgcacattgtgcaggttagttacatatgtatacatgtgccatgctggtgcgctgcacccactaactcgtcatctagcattaggtatatctcccaatgctgtccctcccccctccccccaccccacaacagtccccagagtgtgatattccccttcctgtgtccacgtgatctcattgttcaattcccacctatgagcgagaatatgcggtgtttggttttttgttcttgcgatagtttactgattaaaagtcctgcaaatgtaccacaaacattttgtttttaaccatgtccatgtaactttatttgccaatcatttgacatgtgccacaccctctttttgaatttggatgtgctgacttgtgtgtcatgtcatccttttggtataaatcatatccaaaatgcattatccaggatttttagttttaggtttattaaaatttgatgagaacttaacgatacttgcaaaaaaaaaatctgagtgtagagtcctcttaaagtttaagatgcccttccaccttttatgttatctcacttgtacttgatattcatcacttaaaaaaaaaatcaaaagcaagccaggtgtggtggctcttgcctgtaatccagcactttgggaggtcgaggtaggcaaattgcttgagcacaggagttgagatcagcctgggcagcatagtgaaaccctgtctctacagaaaatacaaaaattagccaggtgtggtggcacatgcctgtagtcccagctattcaggaggctgaggtgggaagattgcttgagccccagaggacgaggttgcggtgagccgtgatagcatcactgcactctatcctgggtgacaaagtgagaccttgttgcaacaaacaacctcaccaaaacacaaaagccttaaattagttttcatagatacaatgcccttcctttttatattcaaattctatgtgtttttaaatatatactttgtttatccaattaccatattagtacaacccagctcatcttctggagctgcagtgggcatcctagaacagctgtggacagtcagtggttctggacctcaggcagattgttggcagacaggacagacagcatttgttaatcctggctaagaagttttaaggagagcttctattatgtattattgagttaggtttgctactacttaggatttttacgtctctattaataagtatgactttcgagttgtctttgttacactttgatatcggggttatactagtcccttaaaaggcttttcaggtgtacttctactttctgtgctcttaaacaggctctgtggcatgataattattgttgctgaaaggccctaaaatacaccagagccactgtttatgaacttaaattatgcaatttggaaattatatgatacaaatatttcaatagtttggctttatgtacaaaatgtgtaatagtaggaaacctaaatttaaaaaaaatgaccgacaatcatgtaatttaaaaggtggtgaaattgtatctatggtttcctaacacgggatagccatcattttttctctaaaatggtgttatatgttttgaattatagaagattttcaggaacgcatatcttatataattgtataagatgcaactgtcttgtatgcattcgtaaaactgggctcaacacattttctggaggggattctttgatcattttgtacttcttcaatcaatttggtagctgagatgtcatcagatactgcctgttaacactggtataaatttgtacatattactataatgaaagctttgtatctattctgttttcatcttcattcttaattttatgtatttatgttattttccttttttattaggcttcatatcgtttcatctattttatagttgttttccatccaaagaaccagctctttaaaaattctgctgatattataatagattagtttctttaatttctacattcaagtcatttttaagctctctcaatctgaaattcctattatatgtattctagatatcttgggttatcactttatctctttctctctctcttgtttagaaaagactgttaaagggagctatttgtctatattttcttctaaaaattctgaagttttgcttttcacacttcagtatttatttcacctggaattgattttgcgtgcgtgttaattgtgaggtagagtttttttctcatgtaactaaccaatgaattaatatcatcatagaatgatctgtgctttctcattgatccacagtgacagctgtgtcatttgttgggtttccatataagtgtgggctatttgtgggctctctattctgttccattggtctgtttgtctttctctgggctattttagtatcttatttactatagctttctaataggtcttgatctctgataaggaagtactttgttcattttcagaagtatcattgctattctagtcctttgcttttccacttcagttttagaatcagcttgtcaacttaaaaaaaagttgagatttgtgacagagttatagtgaattgctggatcagtttggggaaagcagacatttttattatattgccttttaaccatgaacataatatatctttccatttatttaggccttctttaatggtaatttaatgcatttttataattttatccaaaaatgtctagtacaacttttattatatttagttctagcaattttatgcattattgttctctttacttgaatttttaaaggtacattttctgactggtttttgcttgtatataaatgaaatcgattctcatatacagattttatatccagaaactttgctaaactctcttatgaattatactggcttgagaattctcctggattttctatagagtcaatcatataatttgtgattaattacaattttaattcttctgtctatatttcttttacttttttattttattttcttgtcttattgccattgactagaaccttcagctgatgttctatgtacttggttatagagagtattcttttctgctcctaattttaaaatgaatgtttttatgttttaccactgatcatcaaatttatcaggtgaacctagttacctgttagaatcttactagttagctgttttttttcatgaatgttgttaaattttattgaatgtttttaaagtatccatcgaagtgatcatataattttgctcctttaacctgttaatgtagtgaattacattaatatataatacataattatataatatatttacatatgttaattaataacccaagttatctaaaatatatataacaggaatttcagcttcagagagcttaattacagtaataaatatatctatattagtacttaaacaactttgcatttctgaaacaatctaagctgatcatgatatattatcttttttctgcattgctgggctcagtttgcaaacagtaagtttaggactttttttgcatcattttttgggatgatattggcttaaagtgtttctttttcatactattattttcaggtttataaaatgacttctgttgtgtaagccgtaagattggcattatccgttgcctaaatgtttggtagattcactcataaaactgtctagacttagtattctttttgggaatattttaaattgctgttgcagcttttaaaaatgtttataggacctttgagattttctgtttctaagtgagtgacttttggtgatttaaattttctaggaattatctatttcttcctaaaaatattggtgtaatattttttatgatctcttaatttttcaaaaagaatttcttctccatctagttatgcctcctttcattctcaagattatattttattattcttgccagaatttatcagatttttttcagtctattcaaagaatttttagttgatcttctctattatttccttattttataatttattaacttcttttcttctattttattccttccattttatttcttttcttccattttgggggagtttattatattttaacctctatgtaaacatttaaggctctaaaattccctctcactactgctttatgcatcctgtaggttctgacaagtaatatttttgttatttcccattctgagtattttcggatttttattatttctttttgacacctaaattgtctaaaaatatggtttttggaagttactaacttatattttaaattatcttttgttattgatttctaggttaactggaatggtctctatggtccagagagtgtagtctgtgtgtaacgatataatacttagaaatggcctgacacttgctttatggtctagtttaaatctgtaactgtcctgtgtgtgcttgaaaagaatgtgtattgtccagatgtcttaaatattcaatgtgcatttagaacaggcttgttaattgttattaaaatctgtactcctgatttttgtgtgtgtgtggtttatcaatttctgagcgagacatgaaaatattctgctttgatgtgacatttgtcaatttctccttataattccacctacttttatatatttgatgctctctatattttttctctctctatagagaattcttatatcttcctggagaattgaatcttttaacaatatgtagcaagcctctgcccatttctgtcttttaaaatctctgctaatgagtttttcttaaagtctgttttgttcatgttaatatagctaccccagctttcttttggttagtattttccttgtatagctttttccaccttgttactttcaacttttctgtctttaagttttagctatctctcctgtgaacagcaaatagatagattctatttgtgtttaatgcattctgacaatctttactaatatatttgaatttgtttctgccatcttattttgtatctctatcagccttttttcaattaaaatattcccctccttttttccatcccttctcttctttttagtttcaaaactatatatgtttctatttctttagtgattagtatagaaattttaacatggcatatttaacttagcaaagtctaaatttaattggtatttatatcttcctccagaatattacaaggaacttagactgctttaactccaatcacctatcaatttgcaaacttttgtacaatattttagttttatcttttttacctacctttttaaagcattattttattttaagtaatcatttttttcttttagctatattcacatttactttttttttttaatatccgtcatctttttcctgaagtagggcctattgaaattcctataattgaggtcagttcattataaactttctcactttttaactgtttgaaaatatttttttcacccttatcttggaaataatagtttcactaacagttattttctgtcagcactcttttctggcttccattgtgctattgttttcacaaatctgaggacttaaaaaaattttattttaaagttaagtttagttttggctgggtgcagtggctcatgcctgtaatcccagcactttgggaggctggggcaggcagatcattgagctcaggagttcgagaccaacctgggcaatggtagcaaaaccccgtctctacaaaaaatacaaaaaattagctaggtgtggtggtgcatacctgtagtcccagctactcaagaaactgaggtgggaggatcgcttgagcccaggaggttaagggtgcagtgagccatgattgtgccactgcactctagcctggcccacagagtgagaccctgttgcaaaaaaaaaaaaatttaaaaagtaaaattagtttaatttaatttttaaaagatgttatttttattcattctgagcaattctcaaccattatctcttcaaatgttacagattccattctctcatcatttctggaactctggatatacagtggacctcttctattcttcatgtctgtcaaattttctttcatattgtttatttctttggattgcactctggctaatttctgaagatgtatcttcttgttcacttgatctttagcagtttctaatctgctattttaccctatctattgagttttcagtcttaagtactatatttttatttctaaaagttttattcccccaatctgcttgtttatttttgaaggtctcctgtccctttgcaatatttttaatgccttttatttatttaaacagtttttccttaaagccctatttctgactactctgacttctgttgtctgattctgcaattggttggctctagctggctcttgctcatggtgcctagttccttatgtgtttgattgtgaactcatgttccttggaactttatctgagaattctttggggcctgggtggaagttacattcttttagagaggatatgtgtttacttttaccagatgtctggagacactataaacacagattaacttaaaactaaatgttcagtgtgtggctttttgggtccactagttagtatgcattttggctccttatttctctggatttttcctttctcatttgcccttaagaattttctttacattcccatcagctcagccatgcatttaaaatggattttagaaatatcttttctgttaatttaggtgttcttacttggagggtttctctggttgtctaatttgtcattttgctggaaatcaatgtctttattagaggtttaaatttgaagtcatggttttcatcatgcaggtttatctccttcagggttgtgtactctaatttcttgtttgcagtttcctcttaagacttcctatgaatacacatgagccatttgttttcttctgctttttactcaactctttaagagcattgggagacatttgtctttgtcttcagatcgctcttcttcttttgcccttaatatcttcttttttttccttgtgtttatccttacagagggaagtccttgcttgtcaaatactgggacctcagttagattctttccataaattcatgggcccttctaatctcaaactcagacaaaaagaagaaggaaatagtttagatttgcagtagtttcactttgctggttagaaatccagcagggtgggagaagtaagaaggaaaccaggatcagaggcagctatgtggggctattcttctgggctgaagagtttatttcctatgtttgttatggtagtcaggggttagctagggtaggccagagggccagagctgctgcgcctaccaatgaactcctatgtaggaatttcttaagtaaagtagagttgaccctctcccactaggcccaccaggcagggtgttactttagggaagtttctacagttttggctgagtgaatccttaaccttgtgggttcagacacctgttgggtcaattttctcacggctagatgtgtaaacttacatgagaaatatagctccctggggcatgtgaccttggtggctggtccagcccatagtctcctataggctcagtgagtgggaagccaaattgtgattaagagtgagaaatcagaatgaggagagagagttctgtaatttgaactttagtgccagctgacttggcactgacacatccatctccaaaggtaggggcagctttagtccctaagcctaggtctgctctcccctgatggtgctggtgtggacacctgtcagtgtttactccttactcctgtttgcctgttcttcaggcctgattagtacctttcttcatggatatgctctttctctggattaatacattcttcctaattatggttaagtcttagtgtaggaggcattcttccctgttgaggtgactttgcctctccttgctctcaccgactatgaagttatttcatggtctaattctctaagggcagccctatttcccttaattccaggttggggggatgtgggatgccttattgcagctcatgagtactgacaacaatttattccaagactttgaagcaaaggttttctgagcaaaggaatcaattacagggtgtggctcccaagtgaggaagcattttcagaaggcatccaaggcagtttgtctctgaacttcatggttgcacctctgagcttgagacttagagggggagtattttaactttaataacattcatggttttacctgtacttttgtacatatcagatgtgctaattaggaagtcacttatcttttccttaaagtaggtttcctaaggacatgtatttggcaatattggtttagcaagaattactgtatgtgcttgaaagtaactgtacttctttaaaaatatcacccgttcagaagtgttgccagtgaagcctggcctccccccactcctattagttctgattagggaggtttgatgcccgtcactggtgtaatctggaccttcctttgtgactcattctttctctcattttctcagagcaaatacaaatcgcccatcaaatgacaagtgaaagcacagggggaggcgaggggagggaatcagggccgaaatctgttagctatttggagtaattggttatttgctgtgtttgctggttgggaagcagagcacatacttcacggtctctcctgttacgggggctggagtcaccctccgatattggatcctcgttgccggagcccttggctcggggcgccttttccctgcttggcattcctgtggtctcctcgggagtgcacccctcctccctcgctgcacactgcaggggggacagcctggggtgaaacttgtctggcaaacttcagggctccatcagggaggaggaggccctggcttccaccatccggcgctccttgcctccacctcatcctgacataacccctccaccaccccctgccccaagaggtctttcccctggtctgagagggatctcttttcccatctagagaaaaaacactcatctcttcctagagggatattcttggcttcccttggaaatctacagcataggcaactgtctctgaggtctaacttgatgtcttcctatctctattggtcctatgcactggctactccctagcctgggtcaaaatagtgcttggaagttggtacagcgctagctgctgagcacaagactcccctgagtgtgcttggtgaagcttattaacccaccttttgtctttaactcttctctacattaaccaaggcacagggaaatcagagcaaattagcaacaagttcaaaatataaaatatttgaaaagtaatgtgattttgtatatgaaaatgcatacagtaactagaaagtaggttgactttggcacatagtaggttccccccaaatcctcttaaaattgaatttaggagagctaatattagtgtctgtagcttgatgaatgcttctgcagtcttgggaaggccttcaaaaatagtttttctcttaagtagttgtaactcttgttaagcaaaattgtctacataagcagaaggaagataaggtatgctgcccaggccctattggaattgtcacagattctgaattagtcatgttttgttgctttcttcatatgtttgaagagtctgatggaagcttctttcattcacctactggctaggttccattcctctaggctttctgcatagttgtgtgggatcatggtgccctcagagaatccagtcatgggcccccaaggatctatcttagactcctgaattgagaaagcaccagcaacctcgggttccccacagctccccgactctctgtgagtcccccatctggtggagcaggccaatagtcaagtgatcaggtccccttgccatctgtttgactttactggatgtcaggcccatgtagtctctgggcctttggaagcaattcagcattttggttaaaggtctttacttctttcccacctctgctgatccagaaatcagagtaggtggagtaatgatcccctccacagatgaggaggctggactgcagggagtgtcaacaagaggttgaaagcccagtgttccacttgtagaaataattaagtgacttttgttataagtgtgtggagttctgctgaatcaacgtggtggctggctgtgggcatatgtctttgtggctttggggggcataagtgatttggtatacacagggtggagtagttttgaagtcggagtatttgcatgtctggggttttgtctggtctacatgtaggcatgagtaattttatgttatttatgtgtttattcatgtgtgcatgagtaaatagtccatttcctaaatctcaggacatgaaagaattagaggaacctttgtaccgtgattccagtactacagatgtagagctatggggtagcagtactggagatcaaactgatgacactggcaatatcaacaagaacattaatcatggtaaactttacaggttacagcatatctttgtagatatctactctgagccttacagtaaccccagtgttgggttgttatgttactatcttgatgatgatgatttgtactaagagggaaattactttcagcacagtctaggatgtctatctctgggttgacataggcatgaagggctacttaaaattataaacaataatagaccacatttttttttaagagttgggcatatagttctgcatagtgacccaaggtttaacgttataacctcggtgacaaatggatttgaccagaaatttttctctttgatccaactggtcatcctggggagagaaaacaagttctgtacctgccccctgtctcctgcttcctgacttcacagaaaggaattattattgccagtttttccacccgtattcatgaaatgtgttaggtctactgaatgatgatgggagattaaatatttggaacgtatcatactgatttgggtcttcagggggattaaggtgctcattagactggatcaagcctggagaaatagatctccgctattttctctggctgcccaggaactgcatattggctattagctgaaactggagaggcttccagtccatgccttggtcggacttactgggttggctgactgcacaatgaggggccttgaaccttgagcatgggggagtggtgttttaatggccagacttcttgttaaagcctaaggtgacacttcaaatatcaaaccttttgtgtttctttttcctccttgccatgttccaaaactggatgcttagctattgcaaaatgaggtaaaaaacacatttggaatgagaaaacataccaccatttcccttttggagctttggaatatgggattccattaacatcagagggttagttggctttggcacctctgagttcagacatggaatagctgtcctgttttttgtggggctctttcttatggctgtgctaacttattcctggacttcccggggaagagaagggagaagtgggcttgaaataactccatcagaagccagatgagtgaaatagcagaaatgacattttcaagtcacatctgtgagtgtgttaaaaatataactttatttttctgtaaatcaacttaatctctcctgtgagcccacatttttcctgatggcagaaaaaccccggtaatcatcaacattttaggtttaaacttaggcagtctgggctttctatcttcctccttaaccctgggaggcagctcagttctgggttgggcttccataatgtcatgacctccacagggaggaagtcctggtcaccagtatgtgtctactctgacatttagagacccactgatttctgggcacacaggccatactgcatcttctcatttcagcccccaaatccttctagttttcctggctctttctctctccactaactttcaagccctacagggagtggggcaccattaagcagctctcccatgacactctggggtctgtgggaaattccaagggcttaggctctgtctcccatgacacccatgcagccatctccaatcaactgccccacagccaattcctctggcaacttccgggtggctgctgctgcctggacccccaaagttatagaggggtctgttccgtgtacactttggagctgacctggaggcagggtgtgcggtgccttatcagaaaccatcacaagtctctagttctcgcttcctttctccttctacactttcatttctttcgcctatgatggggaaaaactggctggacaaaacattcttttaaacctattattttaatggcacatgatcagcctttgtaaacttaaaagccaaggatcaccccctctttccccacattctgctgtttaggcattcctgtatccatcaaatattgacagaactgcaattatgtctttcaggcaatgttctaagcattgaggttatgagtgttacaaaagataaagggggctgggtgcggtggctcacgcctgcaatcccagcactttgggaggcagaggcgggtggatcatgtgaggccaggagtttgaaaccagcctggccaacatggtgaaaccccatctctactaaaaataacaaaaattagctgggcgtggtggcacacacctgtaatcccagctacttgggaggctgaggcaggagaattgcttgaacctgggaggcagagcttgcagtgagccgagatagtgccactgcactccagcctgggcgacagagcaagactctgtctcaaaaaaaaaaaaaaaaagaaagaaaaaagaaaaagaaaaaagatgaagggctctgccttcatggagaaggagatacaataaacaatattaatacccacgtaaaatctatgggatatcagatggagataatcactgtggagaaaaagcaacaaagagggaataggaattcttgagacgggattgtgatttacaatatgggaaataatgagggtgagactgaggctgcactggaatcaagacaagaaggaaatgaggaagtggcttagggatctatcagggggaatagtgttcctgccaggggaaggacatgagggtgctggaagtgttcaggaccaggaaggcttgttggctgcagcagcatgagtgaggaagaaagttgaaggacgtgaggtcagggaggtgtgagggctcgatcacaagcgactttagaagttattacaagggctttagttttattctgagtgagctgacaaatcactggagggatttgcacagagggtgacaagatccgatgtacatggctgttgggttgagcacggattcagggagcaggacggcaaaggtgaaggtggggaggccagttaggaaactgctgcagtcatcccacatgggatgatggggctggactggggcggtagtgacagagtggtctggttctgagtatacactggaggtagtgccagcatgagtgactgatggattaagtgcaggtcgtgaggaacaggagtcaaaggtgagtgcagggattttggcttgagcatctggaaggagagagttgccatttgttcatatgaggaaggatgtgggaggagcagactgggcagggatgttcagagataggaatctggacttagctttgcaaagcctatcagatgtccagtgggagatgtcacatgggcagctggagtccagggaaggcacccaggctggacagagctcaaggtgggactcatcaatgtatgtgctatttaaagagctaagacccagggagaacccaagggagtgagagtggatagagaggatgggctcaagcactgagccctgaggcactcagatggccaaagcatgggtgacaagaaggaggcagcaaagaagactgagcaggtgtggccgctgaggtgggaggacagcactgtggtgctctggacagtggagctctgcaaggcgaggggagatgcttcagggacagaggagtgaccacttctgccaaatactgctcctggattgattattgaggcctgagtcattggtgaccttgacaagaatgttttgagggaggacagagaatggaaacataaaaattagagacaataagtgtggacaactctttctagaagtttttctataaaggggcgaaggtaatgaggtggaagcccaaagggaacgtgtgggcagagagagagacgtattctgtgaatagtggggcactggtgcctatgtgtgaaggctaactggaatgacccagaggggagggatgttggtgacacaggagagggtgaggagagtcacggagtgatggccttgaatggaccagagaggatgagccccaggcatgagggcagaggttggccttgggctggggtgcaagccgagcacccacaggagcagaagggaaggtagcacgtggcatgggtgctggtgggggcttggggaagtctcttctggttgcttctgcttttaggagaaaggaagcagggacatgggctgagcatgaggccagggaggaggtgctagagggctggggagagggccagtgtggcaggtggtatcaggagaaggggcgagtaaagggccagggaagtgagatgaggtgccgggcggcactggggctccttgaagctgtgccaggaacttggtgtgagacccagcagctggtttcatggtttccttcagccacatttggttgtggggggctgatgtgaagtggagaagagctggatttaaccccaggtggcactggccagaagtacaatggaacaagagaggtggaaggagtttaggagaaggaaagggcaagggggtaaacaaagcattgtaggaccaagaaaatattagttaatatgtaaatcatgattctgccacatgcctaattgctgttaaaggtgcaggccattgattagaagagggtttacctgtgggatgcaggacgaaaatgggggcaaaagtcactgagcagccggccagctggtgtggccgggaggaaggtcataggccattcgtctcagcagctgtgagtctgctggggaacagcagctgccagacatcacctggaactttgaaggaagagggaattgcagccaagaggggaacttggggaaaacagtgtggtaagatttaggtcctgttggtggtaaatagcttgttctattaaaaaaaaaaaattgaactcttatttccttagaaagaaacacttgagattcctgcttttattcttttgtttgatgttatatggttgtatttgatcatttgttctttttaattttagcaactttattgagataatccatgtgaatacaggttcttatttaaagtgtacagtttaatggtttgtagtatattaacagagttgtgcaaccatgaccggaatccattttagaatatcctcatcactgcaaaaaaaaaaaaaaaaagtactgaagagcatttattcctcacaataactgtcaaatttatgctattatttttccatgacagattagataaatggagtcctaaagaggttaagtagtgagcagtctctcccaaccactcccagcccctggcaaccactaaatattttttgtttctatatatttgcctattctggagcttcatataaatgaaatcctacaatatgtggtcttttgtgattaaattctttcacttagcataaggttttctaggttcatctatgtcataacatgtatcagttcttcattccctttttattaccaaataatgtgccagtgtaaggatatatcacattttctttatccacgcatcagttgattcatatctgagtctttccaccctttagctgttatgaataatgctgctttgaacattcatgtacaagtttttgtgtagacataagttttcatttctcttggatatatacctaggaatggaattgctaggccatatggcaactctaacgtttaatgttttgaggaactgccaaactgtttttcaaagtgctgcaacattttacatcctcaccagcagtgtacaagggttccaatttctctatgtcttcaccaacacttattatctgactttatgatgatagccattctagcaggtgtgaagtggtttctcattgaggtattgatttgcatttctgtgatgtctaatgatgtggagcatctttccatgtgctattggccatttgtatatcttctctggggaatgtcaacttaaatacactgcccatttttaaattggatgatttgtctttttatcattgagttgtgagttctctatatattctggatacaaatcccttatcaaatatatgatttgcaaatattttctcccattctgtgagttgtcttttcactttattggtagtgtattttgaagcatcttgctgttgttctttatttaaaaatttttaatttttaaagctatgcaaggaatacttgcatacaatgaaaaattagaaatttttgagttatacacaaaaaggaataaaacatgtacaattttaccattcagagtgccactatgaacttctggggtttagtccttttgttaaaatgagatcacattattttttaaccctttataaatctcatcagttgtgagtaacttttcatgtcagtaaatatatttttccagcatcactttttaggttgtgtaatgtttaatcatatggaggtaccgttcagttccaagcagttcaggtccaaacagttccttattgttggacacttaagttgcttccaatttttcacttttaaatgaagtaaaatctttatgcatatccatgattgctttctttggatagaattctggaataagattgctgtgtcaaagtgcatgttcttttaggctatggaaacgtgcagccagtttgccttctggaatgattgtggccatccgtgccccaccagcagtttgtaggagattagctcttggccaagaagctaaccaggtctatgcaacaacagcaatattactattatcagtaagagcaataaacacttacgttgcatttatgtgtaggcacagttctgagcactctctctatattgactcattgattcctcacaataactgtcaaactgatactattatttttccattacagataattgagtccaagagaggttaagtagtgacccaatgtcacaccactgagcgtggcaggatttgaacactggcagtctagcttctgggtcctggctctcacccaccctgctttactgcttctttatgtctatatcacatgaaaattattggcagaggcacctatatgtgcaagagcccagaagggagaaagcctgatactgtcaaacacaatgctgactattgctttaaaatattctttataatgctaagaaagcttccttttatttttaatttactgagaggttcatttgagaataaatgaaaaattctaacctcttaaacatccattttttgtttttgttttgcatattataaactaggggctggcaaattttttttaaagggtcagatagtaagtattttaggcttgggggacataaggtctttgttgcaaagactcaactctgcaattgtagctgaaacctgctacaaaatatattgatatttaaattaccaaactaggtggctggccagtaggccatagttttcaaatctctgctgtagatgatcctgtgggtttcctctcctgactcactgatgctgaaccactcttgtattctggaataacccagcttgaccacgccagattgactgctgccatctgttcgttagtgttttatttaggatctttatgtctctcttcaggaatgagattaatccgtgtgtgtgtgtgtgtgtgtgtgtgtgtgttgcttcgtcaagttttgcttcataaaacgaatgtaaaaactttcatctttttctatgctgtggaacaaagaatgatttattctttgcaacactcatagaattttcccccaaagaaatgatcttggcctcctgtctttttttggaagtagatcattgagatcttttccactttcttttaaggttattgatctcttcatgttttctactacttttgaatcaattttggcaatttttattttcctagaaaatcattcacttcatctacattttctaagattctgtcattggtttcagcctcataaacctattgatattttcattgtctgctataatatcttttgatttgatttttctcattcctaatagtatatctacttttaaaaattagatttgataaatgtttatctattttttttttttttttttgagacggagtctcgctctgtggcccaggtgggagtgcagtggcgcaatctcggctcactgcaagctccgcctcccaggttcacgccattctcctgcctcagcctcccgagtagctgggactacaggcgcccgccaccacgcccggctaatttttttgtatttttagtagagacggggtttcaccgtgttagccaggatggtctcgatctcctgacctcgtgatccacccgcctcggcctcccaaagtgctgggataaatgtttatctattttaatggtcttttgaaatcttgctctggggtttaatcatcaattataatattctcctttctaatatattcatttctatttacaattttctttggtctttctgccctttctaatttcttgaattatcaggtaatttattttcattccttttgtataaaagtgaaaacacttaagataaaattttttttttgaagacaggcttagctacaactcgtacgttttgggacatatatctcctattgttggtatttcctaagtatccgaggttttagttttggttttctctttgacccaggagggctttaagcatatgcctttaaatttccaaaaggttagtattttatttaaaatttctcatttttctagttttattgcagtatggtcagaaaatgtgactgatagtggttttatttctgggactttactgagatttgctctgtggcttttttatttttttctaagtgctccaaagatgctggaaaagaaggtatatcttctgtttttagtgtaaataatgtttgtctatttagttgtcactgttaatggtattattcagactatctgtctctaattcctttggaaatttacttggttattcaggattgagggaagtgtgataccttccccacaattcttgttcctgtcttttctttgtacagaactcactggttggttgtctgtctgtgcctgactctgagcctgagttataaactcaaacctttaagtatttgggctgggaaagaaaaataaagatttaggggaactcaacagctaaattggattccattctaaccatttctacctaagtgtccatgtttgcctgtgtgccagtatgtgcagttgtgtgtttctgtgggggcatatgtgtgttttagcatacacatctcctttggacgtgactgtgtaagtcagttcttctgcgtgtgggtcatcctgtgagtttgatatgtatgtctgtatatgtgtgtcacccatagcatctttttctttaaattgaactttaaacatcaaggcttgggtctgccttgctctaagctggctttttctagagtggttacaagtcagaaagctctgccatgctgtacgctaccccacctgaccttgtttcctctctcctggctgcagaagaccctccgggtaagtgggtctggtagggcctggctgcagattcagcctcactctggtacacgttccctgtgtggtgtgtctggagacacctggccacacaaggtgtgttaggaccacacttccaggacgggtggagactcgagaacctcatcctaccgtctccccaggatgcctgttcaggaacccttggcggggcaccagcttgtgtttgcctttagtaagctggagctcagagcacttggctttagtttgaaggggccaccagcattttcagaaactctgtgataggtgttcagttcctggtggagaattagagcaggctcctgggagatcttctagcctaccttctcatacagaggaggaaagcgagttccagaatgagctcctgaagccgtgtccttggcccttcccactaaaccagataagctctaatggtacagatgggctcagagtgagtgatgggaccttggtgggcttttggggtgaactgaccatcccagcttcagggagcttggtgaccctctaggtgataggacaccccacctgccgagacaggacacagctgaaggaatattctagacaccagagctaagagggcctgcagacacaccatgtacaggaggagttaaatggtggggaggtcaggatttgccacaacaggcctgtccatcttttcctgcaaataggagtgactggaggaaggatgcggatgtcacacagaaaatttgtgctgtcacatacttcctttcttctcacctaatacctcacatttagcagtgtctttggaataaaggcacttagtattagttgattttcagggactctgccttgatttgaccttggggaggttaagtgctgatttccaatgcttcctttattgcctgggtagggaggcagatgggcagaatagataaaactcttttgggtctgaattttcctggatctactgcattttgttcataaataatacattattgacattttcccctaagagctaccctatgtaccctctgattttggtctcagtgtgttgtgtccctgggatgcaggaactacaaagatgcttatgcccacttcacagaaaggaaaagggaggctggggagtttgacagaaacacacatgcttggggggcagagccagggctagagcctccgcctctcaacaccaaccaaatgctgaaacctcttcctcagtctgcagtctttgccccaggagaggcggaggtttcctctctctgctcccccacatcacccttaggaaagccttgtggtccagagcggcctagcagcggagggagggtttccaactctgaagaatgctgcttggcgagtcctgtttctgaaatggtctctttctttctacccactcaggaggaagagttcatcgattggtggagcaaattctttgcctccataggggagagggaaaagtgcggctcctacctggagaaggattttgacaccctgaaggtaaggcctctcttcagtctgacagtcggtgtgtgtgtgcgtactgggcagtgggagacacaacagaaagagagctcatgcagtagatgtatttgcatttgtctcctcattcggtgtctgagggtgatgaatgctgctagaccagctgggtgagaaagccacccaccgatttacagcccgaagcaagtgtgggctgggataaccaagacagtattcccaggagaatgctgaagaatatggaagtgtttagaggtgaaatgatctgtgttaacgtgccccagccccctaccccttcccaagatcagggtggccccctcaccgattttcaaaatagtcaacattattaatattgcatgacattgaaaacagttaaagcttggagatgggtacgcagggatttgttgtcctatcccatgtctttcagtgttatttgaacttttctatagtagaaaatttgtgttaaaataaaaagagagtcggtttgagaatgtactcctgacccctaactcctacaattgggccagaaaattacctacaaatctgaaaatatgggaaaccctgtttctgtggaaaaaaacagaaatgagtcagccaaattgtggtattttgaggaaattatacaaatataattatgctttgaaaaagtagactacttttaaagaagataatcagaggtgactcagaaattactccttaaaggagttgcatggtctcctggctagggttgccagttaaaattcaggatgcccagtcacatttgaatttcagatgaacaatgaatagttttttaatatcagcatgcatcaaatattgcacggggcatatttctttaaaaattattggttatgaaacaggaaaagttcccttatcccccttgcagggtgtgcagtgggggtgtggctggcttcttcagtgccctgctgctcacacctctaggggaacatgcagatgggcaggttgtggggctccaaccccacagcagtgtccagaggtgaatgtttacagctgaagccccagtggatgtgtgttacagaggactatttcagcttagccatctgtaggcggcttgtgttagctcaattagacccctgccttatcacaagcacagagggctttctgtatcccggggtttcttgccttggtgtactgaaagaattggatcgcacgtgggcttggagattgagtgcaaggttttactgggtggaagtagctctcagcagattggggagccagaagggagatggaatgggaaggtggttttcccctggagtcgcgctgctcagtggcctggactctcctcccaccaccaggaccaaactccacgttgttccgctggtcaatggcctgctggcctgctgaggcctgttggtgtgctcctacgccagtgggtccttctcgacatcccgccgcttgtgtgttcctctgcttgtgtgttcctctcgatgtccagcaacttgtgtttctgcccgctagggtcttgggggtttttataggcacagaatgggggtgtggcaggccaggatggtcttgggaaatgcagcatttgggcaagaaaacagaaatgcctgtcctccctaggcctgtggcacaggcccgggggatgaagccctcgccagggacaccgtcctcctctacccagcacttacctgaccccgttctgtatcagttatttatttgaaattcagatttaactggaaattgtgtattttcacttactaaatctggcaacactacttctggattataaatgggggagactctgtaccccgcaattacctcccaggcttggagaggagaaaatgagaggtgggcacaggctgttagacacataggaaaggccccaagagccctttggaggggactggatgagagagagttgaagcttgtcagggtagcaggtggcctgggctttcaggtgattcttttggcgcagagtctctgctaggcactctggagggcagtttcaccagtcagcaaaagttgtctctgctctatgggcctgcctggtgaattgtgcctggagacctggctgctcagagatgaggcacaggcagcagcagctgcgatcctcaggcagcaagttcctcctcgacttggtagttgggtgtgtgaggttgggcaaagagacagaactatttgtgtaccaggaagaaggtctgacacattaggtctggcatgtggtcctgtggccttgccaaaaagtcagacaacccaagcaagaatgaggactcctgccagggtggcccatggccctggcccctcgctgctccctcaggtgcggatgctgaattggcacccagccctcctgcttgacctctggaggaggtctctgacagcatccaagtgaaaataggctgtccaaagcaaaatgcattcaaactatttctggggggaaaactagacctggaaggaacgctggttctttaaagataagtaaatggaagaaaaccaccatcaccaacgtgggtctttgaaaaatagcctgccacattatggagagagtggagcacacagtgggtgcaggaaaacagattttagaaatcactagcatagggggacaaaacaactcctaatctaaatagaaaaataaaggaacaaaagacacaacaagaaagcattaaaaacagaaaccacagaaaatgcatagtaaaaaaagaacaaaacatcttaatgttcctaattaataaaaatggactaaacttccccattaagtgacaaggactcttagactatatcaaaagtcaaaattcattgtactgtctttaaaagacacatctaaaacaatacaacttagaatggctaaaaaataaagattttggaaaacaatattttagcaaacaaggtaagtgtaaaccaaaggaaaacagaatttaaagtgaagagcaaaggaaacaaaatagagagttttatataaataaaagatgtatatttcaatgaaaagactctcaaatatttatgcatagaatagtaaagcttagaaatacttaaagcaaaaatggataagaatgtataaactgatatctcacacttgataaaagcacaaaatgacagaaattaaagttgcagtggggatttcattacaccattctccttaactatcaagcagacaacaaatacataagaagataaaagatctgaataacaaggtaaatgttttttaagctacatgaaattaaagttatagctttaaaatagagaataaaaataataaaaaatggagaatacattttttcctgatgctcagcgaatacttacaaaatttgatcacatattagttttgtagtaagttaccaaaagcagaaatcatacaagacagattataatgcaataaaatgagaaattaataacaaaagtttaaacaaaaagttcaaccgcttagaaatttaaaaaatattttattgggacttccagtatgaacatggctgcataagtcagcatttttccccttttctcttggaaatcattcaaacccacaaaatccattttcagaaaagttggaaacaaacagaagccacagacttcaaaatatatgtaagggctgctcaaagacaactgaaattggttagaggccactcagcagtaagtgaagagaagatacatgcagaatgttgaaagatcagagtagtagcagatctcagaaagcctagcaaaaatatactttctaatggaagaatgttgataattatttaggacagataatggttacatgggggtttattatctattctctttacttttgtgtgtgtttgaaaattttcataatagtttcaaaatacagttcctgaaagtgaggtttcaccatgaaatataaatgttacatcctttgtttacaaccgtggatacggaaactttggagacaggttgaagctgatgacagaagcctcttagacctgatttgattcagagaagcagaggtggagctacacaagaattacacaaatgagccatatttgcaggaagcagtctgcctctgtggtgggaacaaaattcagctcatttagtgagaaataattttttaaaacggtgtagcctgaattcaaaaatcctgcaaaaaagaaaagaaaatcaaaatgaaaacttatcagtagaagaggacatatacctacttgaaaaattttgccaaggagcagatgagatgaaatgctttgctatgaactttttagaaatggggcagtcagaatgcaaagcaaaaatgaaagtagtcaagggctgataaaatgagtgataaactatgggctggcaggactcaggaaagaaagagatgaaaacgtgaagttggaaggagcacagggcagaagggccacatggaaaacacaaccaagggcacagaggacagaaactataaaagtaagcaaacgaaaatggaaataatgaaaaagttataaaggaacaaagagaaaatgacagatatagacgtcagggaaaggaaacctaacatttgcataattggagtctccaaggaagacaaccaaaatagtaaaaaaaattacagaaaaaaccataatggtttaataaaaccttacggaaatgaaagaatagttgaacatacatattgaaaaagttcatggtgtgtcaggaaaaactgacaaagattggtcaatctgagacatattctaatataattactgtactttagagataaagaaataattctttgggtagtcatacctcctccccacctcttgaaaagaaaaaagcaatattaagtcatttaaaataggaactaaatcaagatggcttccattttttcgtaacagcattccatatccaaagacaataacacactgatataagatcatcaaagaaagacagggtgacctgaggattatatgttcagccaagctcccctccaagcataaaggctacagataaccatttgtacatattcaggaactggagtaatgtgattccaatgagcctgtcttgaaggaactcctaggggattaacttcagctaacctgggaagttatctggagaaaccacaacagaaggactggttgtagttcgaggctgtagtcagctatgattgcaccactgcactctagcctggataatagagcaagactttgtctccaaaaaaaaaaaaaaaaaaaaagtgaatatggtcatattttaccttagactcaaaatgaaaacaaatggaagggttaaggtaataggtaagaatgtaaatatcatatatactgaaaatgtagagatggtaaaactgacaaaaattaggtggagaaggacaaaagagtatggaatatagagtaaggacaatgattgacatatgataaaataaatacagtggacagatattatttgaaattggcaagtcacataataagcatagaagcaagatacaagcaaacagtacaaaggtaaatgttaaggaagatattcttgtctaaaactgggtgatagggagaaggagggagataaaattggattattttattattgctacagtagggaccccataaatactatgcctaaagacatagaggactaagtattatcagaatatataaatgtatataaatactagaacagaagctgagatcattccagctatcagaactgtcacatgcaccactcccatccgccccacacacagaaagtggaccgtgcaaagattaaaaaaaaagaacctatgaaatgaggaaatgtgatataaatacattacatgactatataattaaacaagtaaaaccaagaccaaacatatctgtcttgtcaatacatgttacatcagtcacttactaattacaaaatttaaatcagatctcagagcaaaatctaactctcaaatgaaaagattgataaagtttgaaaataagattaagaaaatgtgtgccaggcaaatgcaaattaaatgacagcagaagtcatcatcttaatattagatgagagggtattcaggttcctaaaattaaatgagacaaaggatgacactttataatgctaaatggtacaattccaagatatgacacttatgagaatatctatgtgctaaatactacaacatcaatacttacaaaacacaacttacaggagatatgagaagcaatggaaacacactggttggtagggggagatttaattcccttctctcagttcatgtcagatcaaggagacaaaaatgtcagaggaggccaagtgtggtggctcaagcctgtaatctcagcactttgggaggccgaagcaggcagatcacttgaagtcaggagttcaagaccagcctggtcaatacagcgaaactctgtctctacaaaaaatacaaaaattagtcaggcgtggtggcgtgcacctgaaattctagctactcaggaggctgagacaggagaatcgcttgaacctgggaggtggacattgcagtgagccaagatggtgccactgcactccagcctgggtgacagagcaagattccatctcaaaaataaataaataaataaaataaaaaataaaaggtcagaggatgtagaaggcttggcatgattagtaacctgatttaacccagtagcctgaaaataaagactacacgtgtggcacttttactacaattgaccatgtaacaggccatgaagaaaactttaataaatttcagaaagtgacaataccaagaaaacattttctgattgtaatgcaataaaattagaaatttgtaacaagatcaaaagcccaaaaggcctcttctacctggaaaattaaaaaaccctctattttaacaattcttgggtgaaggagaaaatactaacagaaagcacagaacatctaggaaacagtgctaaaacactacatattagaacttactggttatagttaaagcagcgttcagagggaatttgtggccttaagaaattatgttaattacaaaaaagaaaactaattaagtatctaactctgggatcaaataataaagataaaactgtaattacagaatgccgggaaaatgaaaatgaaaacatgtatcaaaacaaatgaggcaatgccaagacattagtgagcagaggcaatttcatatgagtaactattttcattatctggaaaaagggagtaagtaaagcttcaattcaagaagctagaataatgataatgaaaagcccttaaaacagcaggacaaaaaaagagaaaaggaaaaggaaaagcagaaaaaattagaaaagagaaaattatagaattgaattgaaaaaaatcaaataattggcactttgattggaatgaatcaactaaaatagataactcttcagctagtctactttagagaagtagagaaaaccaagccaaaatccgcaatgaaaacagggacataacagcagagataattgggagttaggaattttagaaaaattctaagtatatttctatgttaatagatttgaaaatgtccttaaaatgagataatgtgaaggaaaagagaaacagaactgtctcaagaagcagcaaaaaatatgaaagaaacaggaaaattatcaaagaattactttcaaagagagagctggagccagggaattataaagtgaatttcctaaattttcaaagaataaataattcctgtgctatatgtagtatttcacagcagagaaaatattaaaatgtagaaaacctcgatttttatagagctagaattaccttaccatcaaaatctgataaagttcagccatatgtataaatatcatctatgacatgaatatatatgaaaaatcttagagaaataatagcaaatgaaacctaactaatattaaaataatgtcatgataaccgaatttgcttcattccaggaatataaaaagttcaacattaggaaatcatgaacagtattcatcatatcagtaggtaacattaacaaagattatttcagttggtgctgaaaagcattcaataaagtttaatatctattgatgatttataagatcaagtaacatattggaaataggagtttccttaatgttaaaaagaacatctctcaagctaacagccaacatccaacttcatgacttcagaaggtttctttactgtagaaaatgaacttgtatttctcaagaatgttcctaagtgcatttgtctggggagagagtccatggcttattgactgtagattactgaagcactctgtgactcaatataggttaaggtactgagtgaaacactagggcagtcctttcacaaagacaagacaagactcactgtgatcacgttcatgttatcactaacattggtccatatcttctaaccatttcaatgtcaacaaaaagaaacgggtcgttcattttagaaaggagaagacaaaattatccctgtgtctgactgacttgcttaccacctgaagagaaccaactgaaaaattagtagaaccatcaggagaacccagtaagatggcagcaactatttagaaaatctagtggaagaaagattcacattcatagtaccaacaaaagaagcttcatgaggaataaactcaacaataaacacataggctctgtatgaagatgcctataaatagtaaaagtcttgtgtaagttaagaatcagatcatgttcctgtattaaaatgttaatactataaagataacaattcccctgttgaaaattagttttaagtttaatgcaagcctaacaaaaattccaaagaaacattttgttgagaatggaacttaatgttttaaaatttcatctggaagaacatcaggtaacgaaacaggttatgaagccacagtgattaaaacatggtattggtgaaaaaacgcacagatcaatagagcagagaagagatcacaaacaaacaaaaggaggcgtgagcatttggcatatgacacaagtcatgggaaagggagaagaagtttaaacaaatatgatgtttagataattgcctaaccatttagcaaaaaataaattaaattcttgcctcacgctgggtaccaaattgaattgagtgttgaataatcttgctatgaagacattgtaagtataatttgagaggcagacactataaagaaaaagatctttagatgagatgatctagaaatttctggtatggctaaaatgcaaatcaaaatcacaatgagataccatctcacaccagttagaatggcgatcattaaaaagtcaggaaacaacaggtgctggagagaatgtggagaaataggaacacttttacactgttggtgggactgtaaactagatcaaccattgtggaagtcagtgtggtgattcctcagggatctagaactagaaataccatttgacccagccatctcattactgggtatatacccaaaggattataaaacatgctgctataaagacacatgcacacgtatgtttattgcggcactattcacaatagcaaagacttggaaccaacccaaatgtccaacaatgatagactggattaagaaaatgtggcacatatacaccatggaatactatgcagccataaagaatgatgagttcatgtcctttgtaggcacatggatgaagctggaaaccatcattctcagcaaactatcgcaaggacaaaaaaccaaacaccgcatgttctcactcataggtgggaattgaacaatgagatcacatggacacaggaaggggaacatcacactctggggcctgttgtggggtggggggaggggggagggatagcattaggagatacacctaatgttaaatgaagagttaatgggtgcagcacaccaacatggcacatgtatacatatgtaacagacctgcacattgtgcacatgtaccctaaaacttaaagtataataaaaaaataaaattaaaaaataataataataaaaaaaatttctgatatggctaaaaattgtaaatataaacataagataatcaaacgtaaccataaatataacataaacacaaacataaacataccataaataaaaatatcataaatataacataaacataactgaaaggcaagtgacagactgggacaaacatttgatagaccaaagtttaatatcctttatataccaagaagtctctcaaatcaccacagaacagaaaacaaacaccaacagatggaaaatgtacaaatgacaaggatgagcagaagaaatacaaatggctgataaacccgtgcaagtttctctattattattatctctattaaataaatgcaatttaaaattcagcataccatcttctatctatcaaattaacaaagctaaaaatgggtgaaagtgtacagtgatggtgaaaggctgggagtgtgggcacacttgaacactgtagataggagtatataaatccatacaatttttccagagagcaatttgtgcacatcagaggtcttaaaatgtgcatactccttgtccaggaattctttttctgggagcttataataaagatgaatttaaacaagtgcacaaaacacttggataggagattttaaaactcccacaccgtataagtggtttaaaaaaataatgttgatggctgggtctggtggctcatgccagtaatccctgcactttgggaggcggaggtgggaggattgcttgaggccaggagttggagaccagcctaggcaacatagcgagactccatctctacagaaaataaaaataataatattgaaaaaccgcaaaactaaatgttcatcatatcttgtgatacatttataaaattgaatatcatattgccattaggaaggaagagttttatagaagtatattttttgaccttgcaaagattttcatggtacatcattaggttaaaaaacaagttacaggccaggcacagtggctcacacctgtaatcccagcactttgggaggatgaagtgggaggattgcttgagtccaggagtttgagaccaacctgggcaacatggccagaactcatctctacaaaaataaaataaaataaaaaatataaaaattagctcagtgtggtggcacgcctgtactcccagctacaggaggctaaggtggggggatcatttgagcccaggagttcaaggctgcagtgagccatgattgcaccactgcactccaccctgggtgacagagtgagacttctcccctcacttgcaccccccatccacaaaacaagttacaagtttgtatcttttgagtccataattttggttaaaaaattatatatataaagaaaatattcaaaaggacatataccaaatgctgatcaaataactagttatttttgagaattagaatttaagacaatattaatttttaaaaatatttgcttatatttttctaaattttaataatgaacctgtgtcacttgcataattaaatatttattagaaaagatagaacttgaccttcaaggaagagacagaatttgagctgggcctaaatgagaaataatatttggaaagatgatttcagatatgacgaatttagcatgtatgttaacctgtttaatgttactgtttattaggtacattttatcagcataataaaaaacagcttgctgctttattaaatcctaagcaattctaaagcactgctttaacaaataataatcattggctgtttgagaagagacaagtaaatgaattgagctaacaagtttaaagtgatgctccaaagatacacttggattgatatttgataccattgtcattggatatcctgtatgtgaacatttttacttgaaatgctgacctgttaattttccagacatctatcacagtcttcaaataaaatgtcggtccaccctttgctcattcataatcttgttcttttaaaaaatgtactgcccatgtctctgatgactctcaggtacttacaatattttattgaccagaaaaccctattccctaacggagctgaacaaatatctttccttttgctcccttcccctggaattttctgtccatctcctcctctgttcctttctggctccctctgtgacctctccatctctccaaccctgccctcttctttgccttcattcctttattttgtttttggtcactttccctccttttcttcttctctcttccttctctctctttattcactctcacactgtcatgtttcccctccttctcttgtttcctttcctttgctgttgttctactttctttctgtctcttgtcccctcctctaatccccatgtgtggcaggtctatgacacacagctggagaatgtggaggcctttgagggcctgtctgacttttgtaacaccttcaagctgtaccggggcaagacgcaggaggagacagaagatccatctgtgattggtgaatttaaggtaaatcctcgaagacgtccctaacccaggtgggcctaagactgtggtgttggagcaataagtgaaggggaggggtcgtacctacactggtgaccctggtgctgatgttggtgaccacatgggtaatggaggtggtgatggtgatgccgctgacgcagaatctgactggtgatgggatggtgttgggcttggtgatctcagtggtggtgactctggtagagatgagagtggtggtcatgatggtgattgtgtcagtgacaattgtatttgtttttagtctgttttcatgctgctgataaagacacattcaagactgggaagaaaaagaggtttaattgaacttagagttccacatggctggcaaggcctcagaatcatggcgggaggggaaaggcagttcttatatggtggcagcaagagaaaatgaggaagaagcaaaagcagaatcccctgataaacccatcagatcttgtgagacttattcaccaccacgagaatagcacgagaaagactggcccccatgattcagttacctcctcctgggtccctcccccaacacgtgggaattctgggagatacaattggagttgagatttgagtgggaatgcagccaaaccatatcattctgcccctggcccctccaaatctcatgttctcacatttcaaaaccaattatgccttccttagagtcccccaaagttaactcatttcagcattaacccaaaagtccacagtccaaagtctcatctgagacaaggcatagtcccttccacctatgagcctgtaatatcaaaagtaaggtagttacttcctagatacaatgggggtgcaggtattgggtaaatacagccattccaaatgggagaaattggccaaaaccaaaaggttacagggctcatgcaagtctgaaatccagtgggacagtcatattttaaagctccaaaatgatctcctttgactccaggtctcacatctaggtcatgctgacgcaaaaggtaggttcccatggtcttgggcagctctgcctctgtggctttgcagggtacaggctccctcctggctgctttcacaggctggcgttgagtgtctgaggcttttccaggttcacggtacaagctgttggtggatttaccattctagggtctggaggaaggtggccctcttctcacagctctactagcagtgccccagatgtggggcatcagagcccccacatttcccttctgcattgccctagcagaggttctccataagggccccacccctgcagcaaacttttgcctgggcatccaggtgtttccatacctcttctgaaatctgggtggaggttcccaaacctcagttcttgacttccgtgcacccacaggctcaataccacgtggaagctgccaaggcttggggattccaccctgtgaagccacagcccaagctgtacattggcccctttcagccacggttggagcagctgggacacagagcaccaagtccctgggctgcacatagcacagggaccctgggcccggcccacaaaaccactttttcctcctgggcttctgggcctgtgatgggaggggctgctgtgaagatctctgatatggcctggagacattttccccatggtcttggggattaacattaggctccttgctacttatgcaaatttctgcagctggcttgaatttcttctcaaaaaatgggtttttcttttcttctgcatcatcaggctgcacattttctgaacttttatgctctgtttcccttttaaaacagaatgcttttaacagcacccaagtcaacttttgaatgctttgctgcttagaaatttcttctgccagataccctaaatcgtctctctccagttcaaagctccacagatttctagggcagaggcaagatgccaccagtctctttgctaaaacataacaagagtcacctttgctccagttcccaacaagttccccatctctatctgagaccacctcagcctggattttattgtccatattgctatcagcattttgggcaaagccattaaacaagtctttaggaagttccatagttttccacgttttcccatcttattctgagccctccaaactgttccaacctctgcctgttagccagttccaaagtcgcttccacatttttgggtatcttttcatcaacaccccactcctggtaccaatttactgtattattctgttttcacactgctgatgaagacatacccaagacttggaagaaaaagaggtttaattgaacttacagttccacatggctggcaaggcctcagaatcatggcaggaggtgaaaggcagttcttacatggtagtggcaagagaaaaggaggaggaagcaaaagcagaaacacctgataaacccaacagatctcatgatacttatttactatcacgagaatagcatgggaaagactggcccccatgattcaattatctcctcctgggtccctcccacaacatgtgggaattctgggagatacaattcaagttgagatttgggtggggacacagccaaaccatatcaacaatgatgataaaaatgaaaattaacccttccttcttttcagggcctcttcaaaatttatcccctcccagaagacccagccatccccatgcccccaagacagttccaccagctggccgcccagggaccccaggagtgcttggtccgtatctacattgtccgagcatttggcctgcagcccaaggaccccaatggaaaggtaactttcctagagccctcacctcccccagagtagcaggctcaggtacaagtggcctatagaacctggacacaaactctgcctcagggagttcatagtaggttgggaaacagacaaacacacaaaactgagaggtgcctggatggagttgtgttaaggaccaagtgctctagaaggtcagggaaggccagtgtcagtacaggactttgggaaaatggggaaggcttcctggaaggaataggactcttaggatagatgagattttgataggctgggagggagaagaaaatagtgttttaagaggggccaaaagcataggcaaaggtttgaaagaaaattgcttaatgtgtgtctagaacaagaataaagcagaaagataagtaaggctgagggtataggttgggactctcaatggttaatggggaggagtgatgggggaaaggagcagcgttagtgactgctatgcctagtcatggcagagtcccaggtaaaagggaatgctggtaacactcacccggtctttatttaaaattttgatattttgttcatcatggactattgacactgattttaatttttaaaatatttcattaaagtactgtttatcttaataactattttggcccttccttacattttgtgcccaagataagtgcgtgagctgtctccctctagtcattgcctgagatggagaggggagatttgaaggaggaaaggagtctggagttatggggaggtgacagaggtgggaggcagagtaatgttgggaagagaaagaaagaggaaagaagagaggcaggggtggggcctgatttgcctttacaggcatgaggctagggtcccctcttgtctcctgaggcaggtttaggcccagcatgtgtccttcaggtggtgggcggaggcctggtatcccaccctgtagcctcacctttcaagggacagaatggagcagttctcagcctaggcaccactgacggcctccaaggtgtggtcatggccagtgggttggtttatatgcttgaagccttcctgatgctagactaaccctgggcactctgcagccccagctgctgggtcgctggctgaggggtgctgctgcttccaggaagcatggagggagacctccctgggctagcctaggctgacataggctgaccacccctctctcattccatatgcttaagcagaggtcacagagaggaccccagcctggtctcgtcatgtgtgtaatgcagactgttgtgtttctgataagggcctggcctctcccaatggagcagtagattgggagtgtgaaggactcaggtgccccattcccacggctggagccaagaccagaagcccatgtcagggtccaagtggagtggtgtggtgtgtgggagggggccctgtcttggcaggacacagcccacatctcaacttcctgatggctgctccctcatcccatccagaggcaaggcactcatgaagcctcaaagacaggtttggaaagtgttttcacagaagtgttttgtctcctcctccagtgtgatccttacatcaagatctccatagggaagaaatcagtgagtgaccaggataactacatcccctgcacgctggagcccgtatttggaaagtaaattggggcatcttgggtcttggggtggaggagccagacaggataacccacagtctagtgggggagatgtgactggcactgtgaagtccgtatctcttggagcaaaactgtattccttaaatcttgcatgtctatgggggcatagcctcagttagcccttctttagctgctaaagacttgatcccaacagaagctcctagttaaatgctaaacaattacgtctaagatcagaaatctacatggcttgagctcaggagtttgagaccagtctgggcaacatagcaagaccccatctctacaaaaaataaaaaacttagccaggcatggtagtgcatgcctgtggttccagatacttgggaggctgaggtgggaggatcccttgagcctaggagtttgagcttacagtgatctgtgatcaaactactgcactccagcctgggtgacagagcaaaaccctgtctcaaaaaaaaaaaaaaaaaaaaagaaagaaaaagtagaaatctgtgtgtaagctcagaagatgcatttgctaattcttttttttttttaagataaacttttactttggaataattttagatttactaaacagttacagagacagtgcataatttccacttactcaatttcccccactggtaaccccttactcaatttcccccactggtatcatcttacctaaccatgggacatttgtcaaaatgaagaaatcatcattggtgcattacgtttaaccaaactagacttttttttaaaggatttcatgttttcccactaatgtcctcttactaatgtctcaggatccaatctgttatacgacattgcatttagtaattaattctctgtaagtgtcccacatgtgtttgtagcaagagctagaggaagaatgtagacccaagatagtaaaatgattcctgaaatctgagaacaaggaaaggaagaatcaatgcccattgcatgggagtaattcctaggcatcctgaattgctgtttggatgtgagcttgtttaggccagagaggggaggatgcagagggagggtggcagctatttctctcgcacctgcagaagacacctactgttccgatgtcatcaagtcacatattgcacttataaaccggggtctgttgagttagttgtggtcactcaccctgcagtgaggacccagtctccttggggaaatgcagcttttgaaggtgaaccagccctggccagtgatgagctcccaccaagcagggattggagggaagtggtaggtgggagagaggaactctgtatgagttccaggggctggcgagctccaggggctggcgcaggacctcaggctaatgctgatggggcagtgggcagggcctgttccacagtgggtgggcgtgtgtcaggactcaggggagataggggagccagtgcaggaacacacccctcccatgcctgtttccccatctccccccaatcctgggcaagctggtctgcctggtgctttaagcctccttcagatcacaacagaaacccttccattctataacccatgtgtcagacgaacacaacgcatgaggtggtttttgtcaccatgtattccatggcgttaccttctcctttcccctgaggaaactgacaggcaggtgacttttctgctcacattgagctcagccactttaactcacgaacccagtctcaggccataacccactgcccatttgtatggaatcccgagctccctgatggctctaggggagtgtgtcccctctttggatgcagttgtgtgtgtatatgtgtgtatgtatgtgtgtgtatgtgtgtatatgtgcacatatgtgcgtgcgtgtgtatgtatttgtgtgtatgtgtgtgtatatgtgtatgtgtgtctgtgttcgtgtgtctgtgtggtgtgtgtatatatgtgtgcatgtgtatttgtgtgtatacatgtgtgtaggtgtatgcgtctgtgtgtgtctgtgtgtctgtgtggcatgtgtgtattttgtgtgtatgtgtctctgtgtccatgtgtccgtgtatgtgtgtggtgtgtgtatatgtatgtgtgttgtatgtatgtgtgtgtatgtgtatttgtatatgtgtgcgtgtatgtgcatgtgtatttgtatgtgtgtgtgtatgtgtgtttgtgtctgtgtgtctgtgtgtggtgtgtgtatatgtgcatttgtgtatatgtgtgtgtatgtgtgtgtgtctgtgtccatgtatgtgtgtgtgtgtacgtgagtacatttgtgtgcctgtgtgtgtatatgtgtgcacgtatgtgcatgtgtgtgtgtgtgcatatttgtgtgtgtatgtctgtgtccatgtgtctgcatatgtgtgtggtgtgtgtatatttgtgtatgtttacgtgtgtgtgtgtgtgtgcgcgcacgcgcgtggtgtagggaaggaagggccctgccttcctcccttcctggtccagtgtttctcccttcctgctctggctgacctctgaggttctgactcctgcagtgtctgggctggggagagggcccgtctcatgtgcccaccaccgctgtcatccgggtactctctggaccacggatgttgaaagccgacttattttcctgtgggtgctttccagaggttcctcagagagccccccgtgagccctcccactgcactttctgggatatggcagatgctgcgtccctttagctgctgtccccagcccctggttctcagatggtcaactccacaatctctcgctgctacaaccctctgggggtctcacagggcaggattcagagcagttccagtctggcctcagagtggtttcttctcctcccaggaagtccttgtgttccttgcccaggcatgggccagagtgcagctcctcccaaatgtggcccctgccctccttctccatgccacaagttgcttaagtttccctgagcatgcaccaggtgccaggcttgtgtctctcacctgcagggagctcattttagggggagaagggagaatacctctccctttgatgcacatggtagatggagttctcagatacagcaagagctctcgccagagaaatcttttcacaaattctccctccatcccatcccagaagtggatgtgaagagtccagaaagcaggtcccaggcctggagtttccagtcatcggtaaattccaaagctctggccccttgctctggagtaccagtcgtcggtaaattggagtcccccaatttaccgggagtcctccctggactggaggtaccagtcgtcggtaaattccaaagctctggcccctggctctggagtttcacatctcttgcatctgttgtctcctggtgtcgtggtcaaagcttcagttttaatgtgcatttccaattcattctttcggtctgtggtccatcaggcaggcacttgccttatgcccagcacagtttatttgggaaagtcctgtcccccttccccctacacacacactcaggcccagtacagcagtgctgtgggtggttgggcctgtaagatctgtagggggcccaaggaaagaagactccctggggtagtttcgagctcttgtcctgccctgcctgtcccttgggtgccccgtgttggctgacatcgggaatctgcccctcctgcaggatgttcgagctgacctgcactctgcctctggagaaggacctaaagatcactctctatgactatgacctcctctccaaggacgaaaagatcggtgagacggtcgtcgacctggagaacaggctgctgtccaagtttggggctcgctgtggactcccacagacctactgtgtgtacgtggatgggggctggctgcctgcttctctgacaacacaccacccctgtcttctctgacaacacaccaccactgagcacttactgtgtgccagccctgggcttagcacttcctaggcattctctcattgagtccaatgggagtcctatccccactccacagatgaagaaactgaagcccagagatgttattgcttgtaagtggtggaattaggatttgaaccaagaacctggctcatcacattgttataatccagttatctgtaatgcacatagaaggcctagagagggctaggtacctggaaagggagagagggaaggaaggcaggaaagaagcaggggaaacagatgagaggacatgtgtgctgcaactgggcccgaaggggaattttgtgatggtttatgtcaggggaatgcatgtgaggactgcacccctcttcccaccatctcaagtcttctctgggtctgattatctaactctggaaattgaaaacatttaagttgcaattccgtacttaaatgagtccttttctctctgagcctccatttctccatctgtaaaatggggatgcccagtcatggtgagcaatcagatgggacacccactgtaaaagcaaggagtgggcaatgctgtacatgggggtacaccagtccctgcatgcccctctaccctcatgagtgtccttgaagcatctcatctatgtcttgtgcttgctcctcagctctggaccgaaccagtggcgggaccagctccgcccctcccagctcctccacctcttctgccagcagcatagagtcaaggcacctgtgtaccggacagaccgtgtaatgtttcaggataaagaatattccattgaagagataggtgagctgccacatgaccccaaaccatggtgggctctcgctgtatccctccctctctcatcagaccctctgctaccataaaagacccaagcggacataacccacagcagcaggctgtgggtctctccagggcagcacagatgggctccacttgcacttggtactttgaggatcagtactgacctgtgatgccactgtgaaaattagaggtcagggcacagccagggtcagagtgcagtccaaggccaggttggggcccatccgagggcaagatcagaggtgagtctgaagccagtgtcagggtcagagttaggctcagtctctttctggcattggctggtctgactctggttggagtttggggtacagtccacttctcagaaacagttttctacttgaattgcaccagcctggcagcttgaccctgatggtatcttccaagctccccactgacagcccatgcatctaaaggatcccaaggcaggcaggccttgtagtgcccccagtcctgcccagggtcctgcccagctctcctggctgagaatcccgccacatgctctccgtgtgtctgagatgcccgcaggcctgcatcacccactcagagcagctcagactccccagaggtgtttacaggcccagctggccccttgcctcctggttgcttcagagatgtttgatgtcagagctggtgccaaggttataaaagggaaatgatggctttgatgcccccatcccccaccccctcctccttctcattctgttttcctgactctcccaggtcatggctgagccaggctcggccataaggcgcccccagccctgccccccttcattcccttttcccatagaatgagcatctgttttcgggggagtctcatttccttctactagtctgtgagcaactttagcacagggccatggctcatggtcataaagtcataggaaacaaaagccagaaagctagagatggtgaggtccaacatctgcctgcttttacagatgaggctggtaagaccaagagtggtgaacgacctgcccaacgtcacccaaccagctaggggcagagccaggttcctggccctgtgtgccttctgaggtgcatgcctcttcctttgaggcccctactgaaatgggcagggcaggtctgatgggtgaacacatgtgtgtgtacatataggtgtgcatgagcacacctgggtacatgtacagatgtgtgtgtccaccatcagctcccaaagccaaggcctttgacatagtgggctccaagttcatgttgttggatggttggccaggcttctctgggtcaggaataccccatgtcttctccccacctgtagcaccagtttttgacccattccctagcagggaggagctgtacctgggacgcacctggggacaggcacctaggttcatgcctagtcacgcacctttcctaagtgagcatgtgatctcagctgctctgctgctagttgtgtggcttctctgtgcctcagatttctcttctataaaatggggataataacagcactcagcttctaggatcctcatgaagactaaatatgttaatagcttgaagaacagtgtgtggcacgtggttcctgctctggaagtgtttgctgttattgctattattttagctactgctaatagtagaacaacttaagtgaacgagagcataatactaacagcactaagatgccaaatctaggagtaaaggttgctgaggcttagagttgggagcagtcagggagagcttcctggaagaagtaggctttggagacaggaggatttgtatggtggaaaataggaataaaaactatagaacaggcttggtagaaatgatggcaatggggaatctggattttaagcctggagctagtggacagcaagatttcccctatcaaaagtgagacatgaggaccagaaaaagtgcatctgtgctgggggtgaggctgcgggggttagagcttcttatgactcttaggcagccctgctcagcctgttcactgggcagccccattatctctcgcttccccagctcctgcaacttttttgtcttctctctggggcagaggctggcaggatcccaaacccacacctgggcccagtggaggagcgtctggctctgcatgtgcttcagcagcagggcctggtcccggagcacgtggagtcacggcccctctacagccccctgcagccagacatcgagcaggtaggaccttgacccttgggtcccagagtcctcgaactccagaaagccccaaccccagggacaacatggatatcccagaggagccagtgggtcccttgagatttggtcaatccttccttgacccatttcttcacagtctgagtgcggccatggttggcctgggaggggatctttaggtcctggcttcctctggctgcctccatccctcagggcctgcgaaacgaggctgagcttctcccctcacccctgtaggcctggcctccgacctctccttgtcatcctgaagcctctctgtttcagcctgacttcaggttggattcccccatccaaccactatctgtcagtgactcagtctcagatgcccggccctgtgctgggtggctgtggggtatgcagccagggtggccctggcatcctatgaccaaatgacaaagccacccacagagagcagtcctcagtgggaggggaatcctcccacgctgaagggcggggaccacagagacagcagccttgggatggtgacagggagggcttcctggaagaggtgagctcagagctgggttttggaagaggagaaggggagacaaggttataggcaaagagaaaggccaaagtgagccatgaggatgcctttgtgaatgccagaggacattacctctgttgtttggaactgagctctctctccacctaggtggtttggctaccggcctccccaaagtggcacaacaggtgtggaaacttcagctctttcatcttctagttctgtgaccctgcagaagtgacttaattgaattacttcaattcctgctccttctgctctaagatgagacaaattcacacctcgcttgcagagagggaggaggataaggggtgggcagggagagtgatgtcctgccatggaagccttctgagccctccataactgaacggtgctctttgacacgccacgactgtgcacatgccattcccctggctgccaagactcagctcagccaccaccatctctgagaagcccaccctgacccttgacccccaggcacaggcccaagtcagaggcctgtggggcagtggtcacctctgcggttgaccctgtagtcccctgtttagggcagtgaggctttctctggaagggcctgggtttctctgttctgtgccctcagcatctggcccagagcaggtgcttggtaacagctggttaaatgagaagggtggggagagaacggaccctgtctccgcaggggaagctgcagatgtgggtcgacctatttccgaaggccctggggcggcctggacctcccttcaacatcaccccacggagagccagaaggtgacttgcccagccacaggctctgagctgggctgaggggtgggggcgttgcagcctgctgtgggcgggactaggcggttgctcttttctgccgggcttcaggctatttgggccatggaatacagttctcgtttgggcctgggccagtgtccagccaggcaggcatcgagtcctcttggaccagtctgcttcttggcttcttggcttcttaaggccttcccatcctttggtaggaaatctaggtggattagagtgatacctttccccaggtttttcctgcgttgtattatctggaataccagagatgtgatcctggatgacctgagcctcacgggggagaagatgagcgacatttatgtgaaagggtagggagccagcgtcctcttgcctgtccagcttcccgcagctcccgtgctccctctgggttgtgcacagcacggggggctctggctcagggaagggaagaacaaacaaacttccaacgagggctcctgggggtggtccctgcctttggggaaatcgctctcccaccagatttctttttctgcactgaactttgggttgaacttacaagtttagtggctgggaagttagaatgttttcaaatttatggcacattttgtacatcgtgccgatttcctgggaattctttttgcgataagctcatttaccttcttaactccttgtctgcctaagttgacgatgtatatactgtgttggaaatcttaatgagaactattctctaaaaacatgtatgtctagttggatgattggctttgaagaacacaagcaaaagacagacgtgcattatcgttccctgggaggtgaaggcaacttcaactggaggttcattttccccttcgactacctgccagctgagcaagtctgtaccattgccaagaaggtcagtgtccttccgattccctgtggtgccagcaccagggcttctaaagttagcctgacctgaccaccacgtccctgcctggcaactgtcacaatctcactgctgccccaccatgttggagctaccactgccatctccacatggccaccacctccactgtcccagcactgccagtgtcaccaccactgctgtctcagcattgtgtgatggcctctgtcccatcacagccaatgtcaccgtggctgctgttccatcactactggtgttatcacaactgttgcctcctcactgccaaatgtcaccaccactgttctgtcattcatggcactaccgtggtcccacccctgctgtcattacccccaaagccacctccaccatctctgcatccaccccttttccactctcttccaccatctttcccatccccagccctgccgccaccccatggccacctcatgatcacacagtgccatatccatcatttgcagctaaatccagatcccaaagtcactgcctccctccctacctcagacaagttaagcagcaggaaggaccatggggtctgagtgggtagagtagggacacccagcatggccttcaaaagggcagtggggcagaccccatgggggagcttcccaagaaggccagtctggcctatagatcatggtgtccacaggattgggagttgcttggctaagtctttctcatatcccattttccacatctgtgcctatggtcaccgtccaagctaggtcacagtccaagtgtgcctgcaaggcccacagccatcaccctcctctctccactcccacctctcactacaggccaaaggcacctagggagacctggcttgcatcagccagaggggaggctggatttggggacctcggtctctgtgtctcagcatctgctagtttaggtctcatctggggcgtcaactttttacccctgaactaggcagaactcgaggacagccagcctcttcctggtaggaccaggcctgccctcagagagcagcccccagagcacagaatgggtgctgagggcagtggagacttcagggctatgctggttggaggcagaggggtctctgctgtagcttctggccatccttgtcccacccggcattaaattccaccctgaggtgctctccaactcaagggggtaaatgcctctctggcatctagattctgctggcccgatttccttccagaggtggctcaaggctttaagcctcaaagctcctatgactccttgtctcctgaaaggaaggggatatatgacgcgttccagtgcctgcattttcttgattctcttcattacatcccctctgcatggcccttcccagcctaacatgcaggatcatctgcacattagagaaagcaaaatgttccgcggaacattctgaaaccatgaaacaaaagaaaacatggattcaacagggttaagtggatccctttaccgagccattgctgtggagtgactggcagaaagcagaattgagcaacagggttctgggaggtcaaggaaagcatgggccgtttgcaggttgagcctcatttgctgctgttcagtgtgcttccctgacatgagcctgtttccatcagaaagccaaggttgcatctgccccaagacacagcactgccccagccagctctgctgcagacagagggagagggggcctgggagtggagagggagggctgcgccccccgtggcacccccagggctcacctacaagggctggagactgagaccgagaggaatgggaggtgggacagccccttcctcatgacaggtggagatgtggattaggagtggctgttttgtctctgaagtaagaggagagatgatctggtactggggcaggtgacttgagaccagtggaaaaggctggaaagagctgctatgagtgacagtgagggagggacacagagagatggggagggaatgtgactggcagcacagagagggttacccggcagttctggggacccagttgtggttgctgattaagaatttggggtggctccattctggcaatgttgtggttttgtctctgcatcatagggcctggtcaggaggaaggaagaaggggagagtggggccaacccgtgggcgagttccagaggaagacaggggtcgaggatatggaagggactgcctgatggccaagagggtcttggtcagacttgggagaatgagaagcccacaggggagcaggggtggcgaggaggaagagaggtcagagagtggaaggagaggctcactgggagggaaggccagaggggaagggacgttctccgtgatgccagactctggggagaaggtggctggaaggaggggcggagaaggtcagaagaggaggctgagaaacagaaacagaggccacgtggctctgaagtcaaccagaggtgggagacagaaactggctcggccgaaggcggagacagaaactggcttggccgaaggcagagccagagggtccctcttggagtgaagggaccctgggaggcaggcagagcagtggccacagtggggcaccagttagctgggttgggctgaaggatcgagtctggatgggttcgtgcaggggcactgcacagcctctgggctccctgggcctgccacggagccagccctctgccgtggggttcagggcctctggcaggcaggccctccagggaccccattaaccagacgagactgtcgtaaagtacaaggtctcctttcatccggcggctttgaaccaccactggttgccccggccaggctccccacctggagcccagcacaccctgcacgtcaggcacccaccctgcaaataaacagctagtaaaagcgcccaggccaggagcataatgagcgcctgggacctgggggggttcattccccaggctggagccccagcccagctgctcccaccaggggccgtttgaacctctggctcattaccgagcccataaaccaagctggccagaggaatggaggctgctggcgggccatgcaggcgggcctgcggagctggccataaaagctcgccagaggagggaggcacctgcagaagggctggggcccggaaaaggggggaggcaccagacagagggctggaggtgaggggccagctggagacctgagccccttccccaacccaggcagcagtccaggccgtggctgggtgctttgcacggggactagtcctcacggggcaggggtcatggtcttcggttcgggagctcactgggatttccgtggccaacctctgaggctggggtggccacacagcaggccctggctggacagcaagggtgggtttaccaggcatttggtggagcttttcccctgcagagttgggtccaggcccttgctctgacccggcactcaggacttggcacccaccatctgcagggtggtcacactgtttcctgtccttgccactcacccaggggagagttatagtgagaaaacagagaacaagactgcgctggaaagccctagtgacagtgctgtgggttgagtgtggctggactgaggggtgctccccggcctccgcatgtgcagtcccacaccgctcagttgctccatgaagcctcagtgggaggaagcccaagatgaccttgttccaggcgagctggtctgagggaggtggggtggggagagaagggcccctcctctcctttcagcaggagacggaacttcccagcacttcaggctttggctttgccctgggtcaagctcttggagtgaagttgggtggggtggagagggaggagctggggtctagattccagtgccagctccttacagcagcgtgctgggagatccttctatgacagccagggtagggtggggtccctcagggtctcagttaccccaccctgaccctgagatgccaggtacagagcaaggtttaaggtagagagcaggactctggaacccagctgccagggtttgagtccagcttgccacttcctagctatgtggtcttggacaaattacttgctttggtctcctccactgtaaagatagtatctcctttacaggtggttggaaggataaatgagttcatagcagtagagggccaacgcataggaagcactatattaatgttattattattagtggtcagacctcaggcacattcctttaacttctccaagcctcaccttcatcatctgtaaaatgggagtgataaccttgacttacagagttgggaggattaatggagccatcttatgtgaactgagcctgcacggtgcccttttgggcccttgaacactgccttctgggatctgtccttcccagtcttcccacaggacctggctctggcaggtcccttggggacatcctactcctctgcctcctccaggcagccttccaggctggaagggaacactgcctctctctaaccttgcttccttgcatccttctctgttcctcttccgggtcaggatgccttctggaggctggacaagactgagagcaaaatcccagcacgagtggtgttccagatctgggacaatgacaagttctcctttgatgattttctgggtaagcgctattgctagaatcccattctgcacatgggggctgccccagaacccacactgtgtgtttatgccactgttggacccttggggaagcctagcaggaggagtgatcccactttctgctttcagggagctcagggtcatgtgtccccagtgttaagtgaggtgtatgacacacagcagtgtcagagtgattggtggccactgagggtgggcctgtcagtagaggtggcactgaacactgggccatgttggatgatgggactcagatatgtaagtaagcgagggacgcaagtgtgtgctgcctgtcgccagctgtctggcctcacatttgacacagactgagccctgtgagtgagggtctcaagtcagtcttcatccttgtgcctgtgtgaccgactgagtgaacaaacccaggctctatccccattacccccagacagggttctagtgggaagggctgtgatgaaatctgggactggggagcagggaggctgggttgaatggaaggtggtgatggtggccttgtagggttaggatatggggacaaggaggaagacattgtatggggcctgcacgctcatctgtgagagcagtgagttcaagatagccctgtcatggctataaaggttaactctggaaaatgtggtctatccatacaatgggagagtattcagccatgaaagcaatgaaatactgatacatactacactgtaggtgaacctgaaaacatgccaggtgaaagcagccagacacaaaaggtcaaatattatatggcttcatgtatatgaaatgtccataataggcaaatccatagagacggaaaataggttagtggttgctagggattgggggaggggggatggggagtgactgtgatgggtaagaggtttctttttgcggtgatggaaaggttctggaattagatggtggtgaaggttgcacaactctgtgaatatactcaaaggcactgatttgtacacttaaagtggttaaagtggtgcatttatgtgaggtggattttaccttgattaaaaaataaagcgagcttgtgaaaacggcaacccaggaagtcaggatccctggtttctagatccattctgccacttgggagcagggtggcctggagccctcttggggtagcccttgactggagaaggtgagtcgttcttagctgagccctggggcccctgcaggggatattctgaggcgcggcttccggcagtggggagaaggctgcctgttcacttgactgttcccccgccctgcgcacctggcctggccaaatgcccagagaactttgttataaaagcatcaggtgcaaaaagcgtggcaccaagtttgacttctattattttacttattattttgtacataattcctgtagaggaattagaaaatgcaggtaaggaattagaaaatgcaggtaagcaatgcttcctccccaccttaatctcaccacccaatttctactaacattttggcatgtattattgtattatatattatttgagacttaaacaaacataagtattttatatatgtatttatatatacacatgtacatgcatacatatataatatatacatatattcatatgtatatgaatggatttctattacacagactgttttatatcctgatttttgaaaaacctaatattccaagaacatcctttctggtcagtaggtatcgatctgcatttatatctccatcatcacacttaatgcctgcctatgttttgtcatagacgtgggccctgttttgattaatcctctcctggtgggtattcaggtcatctccaggtttcccaatgtgagtaacaccctcggcatatgcacatccttcgatcctttgtgcatatctttccttaactctgagaagtagatatgtctttgtacattttaatggcttttgaaacattttgttcagttgccctctagaaaggttttacttgtttatactcccacctgtgccctgtttgtacagggtgccattttccctaaacttttgctaccactgtacattaaaaaaaaattgccaataagatatttcctttttatttgcattttttattgcatttaaggtagaactttaaaatatatttattatccgtattgtggaattttcttcatggttttgcaatattcatcttttattattgattttcagagccttttatgtattaagaatacattgcaaataatttctcccaatttttcttatgctttaaaatttttatggagactttttttcttacagactttgtgaatttatggcatcaatctttcctttatgaagtgaggctttagaaaattagtttttaaaagaaaaacaaaaaaaaaaccctgtgttttttactgactgagtaaatcatgttcaaagtaaagttaaacagactcatcctttgttttaaaaaataaaaccattaacgaatactagcttttatatccatgaaatttttcttttccaccttcataatttgttttctaattacataacttgtgtcttttgaatatttattactttttaattttaaaggtaatggttaagcacctataagctcaccatccagatagcctgtgtttccttacagtcttttatgtagatcatgctgagataatgtgtgtgtatgtgtgtgtgtgtgtgtgtgtggtttaatattctgacatttgcttaatatattggcaccatatttcaaatagaaaataaacattcattcatctgcactggagggatggagaaatatatgggtgggtggagcatagatgaatgccgatatacagttgaataagtggacagacaggtggaataataacctgattaatggatagatatagtgcttaacaaatggtagctatagaggaatgtggatagttaggtcaaagcagacgcacagatggaaggacggattgataaatggatgagtggaaagaaagaaaactagaaaaagagttatatttaatgttcggttatagtaactatgcattctacactgaaaaaaattgaaacacctttgcatggtgtttgagaatttctttaatttggcttcagaaaataatttttctattgatctctcttaatccctttggcaacctatgctccaatcccattgactttatcagattatgattagattaggcgaaaccacatgaaattgctgtttaaatgggtcaaagatagttaaatacaagaattttcatatggttcaacctaatagctgaaggtatcctgggagatgatagataaaagggatgattagataaaacaataaaaaaagatggctgcttggataactaggtggtagatgaaaaagactgttggatgaaccacagtgaggtaccacttcacacctactaagataatagtaataataataaaccagaatatagcaagtgttttgaggatgtggagaaattgctggtgtgctgggacattggtggtttgagtgtaaaatgattcggctgctgtggaaaactgtttggcagttccttgaaaagctgatcatagaattgctaatgaacaaagaatcctactccaggtgtgtgtgtaccccaaagaattgaaaacagggactcagacatttgtgtgctaacgttcactgcaacattattcataatatgaagttaaaagatgggaacacctcaagtgtccatcaacagatgaatgaatgaacaaagtgtggtacaggttaaatataacttatctgaaatgcttggaacagaagtgtttcagatttctgatgctttttggattttggaataattgcatatacttaataagatatctttgggataggacccaaatctaaatacaaaatttttttcatatatactttgtaagcatagcctgaagggaattttatagaatatttaagataattttatgcatgaaacaaagtttaagtacgtatgtgtggagttttccacttgtagcattatgttggcaatcagaaactttcagactttggagcatttcaaatttcagattttcagattatgcatgttcaacccgtatatgcctagaatggaatcttactcaaccataaaaaaaatacagattaaaaaaacactactgatatatacaacaaggatgaaccctgaaaacattatggaaatcaaaataagccagacacaaaagaacaaatattgtatgattccacttatatgaaatatctagaatagacaaattcatagagacagaaagtagactagaggttactggggcgaaggggagggaggaatggggagttattgcttaatgggtgcagagtttttgtttgggggatggaaaagttttagaaatagtagtgatggttgtacagcattgtggctgtaattaaagccactgaattgtacacttaacatggttaaaataacaaatttcatgttatatgtattttaccatgataaaaataattaaaaaaaaattgatgtatggctgtttatagacggtgtatgaatggatttgtacatagatgagtaattgaagaggtgggtggctttgttaagggtgagtaaataggagtggatgaacatgcatatgaacgcatgagtagatgaatgggaagctgtatagatggaatgggagacaatgggtagggaggtggagagttcgtgagattttacctgtggctcggccatggatagaagctggtgacagaggtgactgagtttttcctgaacctgccctgcctaagggtggctacaggctggcagtgatcgagaaacccttggccaaaaactacctctctgttgcaggctccctgcagctcgatctcaaccgcatgcccaagccagccaagacagccaagaagtgctccttggaccagctggatgatgctttccacccagaatggtttgtgtccctttttgagcagaaaacagtgaagggctggtggccctgtgtagcagaagagggtgagaagaaaatactggcggtaagtctacttcctccagccccagtggagggcatgggggaagcttcttccatagaaattgtcagaaaatacgtcatcagaaaatacatgcttactgttcctcctcctttctccccctctcctgcccccatcccccctctctctctattttccaaggcattctccctctttcctcccaattcccggtcgccttctcctttgcggctcacatcccaggggaagcctatttaaaccaaaagattactctgtttatactctactcattggctttaatagtgacctgtgtcctgggttccctctgatctggacttcctgggtgaatgggcgggggtcatgcctctcccatttgagcaggaccctccaagggaccatccttattctgctctctgagaggtctgcttagaggggtgactggagggcccgagagaaccgtccttcccctgagtccacagcagccatggagaggaagttaatccctgaaagtttacttagaaatttcaggcagccagccaaccctgaaagtggtccttgaaattgaatatacttgttatataaagagtggtaacaataagaaatactagtaccccaaaggaaaaatgagaaaacgacatgcatagctaattcacaaaataattaccaatgtctgcaaagcatttttaaaaaggtttagtctctccagtaattaaataaagggatacagtagtcccccccttatctggaggagatatgttccaagacccccaggggatgcctgaaactacagatagtactaaacccgtattatgtactgtgtttattcccatctatacatatctatgagaaagtttaatttctaaatgaggcacagtaagagattaacaacaataactaataatagaacaattataacaatatattgttataaaagttaggtgaatgtggtctttctctctgtgtgtcaaaatatcttactgtactgcccacgggtagctgaaaccctagaaatcaaacccaaagataagggaggactactgtatttttaaatgtgttttttttgtctgttaaattatatatatttttaaaacagaaatgctcattgctgctgagcatgcagagagaagacaggccccccttttacttctgctgggagcactaatggttttactgtgtggaggaagaaatttgataacatatagtaacagatttaacaatatttatgccctcggactctgtcatccgacttctaaaatccttctaaataaataacccaataaattttaaaagtctaggttctgggatatttgttgcagcattatttaccctatcaaagagttggaaacaacctaaatgaaccaaaataagtagtttactaaataattatggtcaaccatcccatacaatgtttggcagtcattaaaaaccgaactttaaagaatagacaactacatagtgaaatatattccgaagtgaaaaaagccatctatggaactgtatatgcacagtgtgacatttcataagcttgcagagaaaatcagctatgatgcatgcaaatgttaacagtgcttgtctccatgtagtggaagtaggggtggcagtctcccttctttatacatttctgaagtttccaaatgttttacaaagagcaggtgctgcttttatgttcagaaaccctacatctttttttttaaataatgaagtggcccttatgttttttctggcctggttactctccaggccactgagcagagccttcgtgcccctaaccaagtgctctctgtcccctcagggcaagctggaaatgaccttggagattgtagcagagagtgagcatgaggagcggcctgctggccagggccgggatgagcccaacatgaaccctaagcttgaggacccaaggtcagtgcccagcccctgagccccaatgcccacaggtctgggggtataggccacagtccaggaggcatcccattgcatggccatgtagaagtcacaaagcccacgtggctcagagaggggcacgactcatccaaggccacacagtaagttagggggaaggtgatgggcatctgtccagagaacactgggctcagcgaattcaagatgcaggtgctattgggtacctgttggttgtgtgccaagcatgctatcctatgcatgtgtacattgtgctatggaaccttccctgcagggtagttgttattatccccattttacagatgaggaacaatctcagcaaagttaaataagggcattccagctaggacagtggtgaagcagaaatgctctcacctggtctgattggctccagagcccgatcaaggtcttgaccctaccaagctgccttcggtggctctcctatggtgccagtgtgactttcaaatggtttttcagccttcatttttccatctgtgaaatggggagcccaatccctgtcttccctacatcacagacctcttggggagatagaccaagccaatggatgtagatgctgtgaaggcagttacaggggcagagtcactgaaagatggctgtgggggctcaggaatgtgtttgctggatcccgccccaccagcctacttggctcaagttggatttagcatagatggctcagttagtcaccatgctgtgattagcaccgtgtgcctgagtgccatggggctggcagagcagtgagaggcacccttgcctaaggatgctgggatctgcacaggaagaaaagagagacccgtgagacaccagtgtgcaatctgatgttaacggggccatgatggagacccagaatcctccacgtattttgagatgtggagctggcctagggaaaggttttgagattcttggttgtgagagaaccagcttcctatgttctcttcccaccgttgttccctgagcatggactagccatgtgcatctgggcaggtgtcttggcttatctggggctcggtgggctggagagcactttgaagcactgcccagctcctaaatctgcagtttgtgattaagtcctgggtcaggaatgggtgagggcaccaaggaaggtgtcctggagaggatggcagagaaactgggccactgaggatgcttagggcttggcagcacccagaagaggagggcagcacaggtgggggtgatactgtagcaagggcttgggggagagggaatgcaaggtgcaaagggctagtttagggacagggcctgggcaggcgctgggggtggactgtggagggccaggccattggacctgctgttgagagaagagtttggagaaagcagccctagtaaaggatgcccagttgacctccgggatctcgcttccaggcgccccgacacctccttcctgtggtttacctccccatacaagaccatgaagttcatcctgtggcggcgtttccggtgggccatcatcctcttcatcatcctcttcatcctgctgctgttcctggccatcttcatctacgccttcccggtgagcaggcctgacgacactgtggtgggggaactctgggtctaatgggggagttcatcattgtcctcaaagagctctcccagtctaatggagagaagtaacctctgtccttggagagcccctggtctgatgaggatacagagcccagctctggggagtctccaatctggtaggtgtacaaagttctacccttggaggctcttagtccagtgagagaaactgagttcttgcccttcatggtgagacaaagctgtcctcagcaagcccctagaatttgtaatgaaggggttaggagaagatgaggccctttgggttgcggtgggcagggggactttctggaagggaggtgtggaactgggtctgaaaggaaggtgagatgttgatggcagagcagagaaggtccctttgtcttaacagcagttgcaaatccagaggaagggaggagctggggctgggagagcatctcagggtccacctgaggcactcaatagagtgtgtcctgcctcctgcagcaggtgggcatagggaagctgtcggggagcgggaggctggcccaggagcccttacttggctcggtgcccatttgggtttcctttcacttggtaagaagccaattgatgagcttgtggggccataccagaggtggctgtcgtgcccttgctctgtggggccctgcctgggggaggaaggtccctgcctgtgcttccccagcccgcacagctcatcagggaacccggatcaccagggagcctcccccagtgtctctgatactttagaccttgaaggggttgcagcattctcaggctgacacctgatttctaatgctctttaaaatttaaaagaaatctttttaatatgaaaactccaaccctatataaaagtggagagaatggtgtaatccaccccttgaggaccttatgttggtggcaaagacgcaaacacccagagaaggaaagggcctggccgtaggctgcacagtattccatgcacactcccaatccagggctcactgtgattcccacttcaggcctcagtcctggtcagcaccaggccactggcccagagcattgatcccatggcagacaggctgcttggggaactgcccccaggtgagctctttgctctgtgagtcctccaggaggaggaaagggcaagagcccctccatcccactgcagctggctatgcccatgtctgcagaatgcatctcagagaggaagagagttataaccacacagctttccatgcagttctaacagctgaactgagaggagctggggaaaggatgtctggtttggatgtccggaccagctaccatctgggccatagtgactaaggagagtctagaaccagggtggtgaagggtctgcctacaggccaggcctgctaagctggctgtggtcacctgaggcgcaatggagaaatgtttctgaggttctgaggtttgtccatcagcaaaatctgactgtggtccagggtagatctaggttgcagggactcgaggtgtgtacgatgtgggaggcctctttaagccaagggagacgagattacaaatataagctgagatacaggactgtggaagagtgtgtgcacgtgtggtgtcctgcagcatgagctgttgctgtgacctgagatccggggtcaggccccaggacttctgcctggtgtctcctgcccagggggcacccttcccagcctgcctcaagctcctcctcccattcggagcccagctggccagtgttcagttagccacagagactctaagcacgtgtgtgcgtctgggaggtaagggcgtgttttggggatgagggagaagaggatgaggcctcatgccactggggagtgctcacttccctggggagacattgaaaccagagagtaaggaaaagtactgtggatgatcaaatgctcttttgggaggctcaggccgtgggagtttaggaagagaagagctgctgcagaccctcgcccttggtgtagtcggaggactagcagcagtagcaccagggaactcactagaaactcagagtccccggccggccccggcctgctgagggggaatctgcatgtaggcacatgatggttggagaaaccctgttggatgtgacagagctctgtcgctggagtcaggattatggactcttcctgtgaccttggcaaatccctcctgctcacatgaggaaggggctgcactaggttagctctggccttctgtggctgggactgtgcttaggggagcactgtcatcttccctggctgctgtatattaagccaagcctccttctgaaaagccaaggggaggggaaaggcaggtccaaagtggcatcaccaccacccatgacatgcctaagcccagcccctgccagctgcaccctgcactgctaggctactgggcagcagatctaggcctccaggggcctggggaaggaggccctgctgcctggctgggagaggaaggaaagatttccagtcacttccagcctgtggtccttcctcatcgctgtgggcagaagcagagtggtactgtggggggcctggtcagagctcctccctgtctcctgtccccccagcagcgggccactctcctttgagttcttctggaagttgtcctctttaaaatatggaccctgcttcccctctcccagggctggtgtggggatgtcagatcctaggtaaggggtctagggatgaagggggtggcctgggcctgaggctgcagactggctttgctcacaggtctttgctacaagctgagcacatcctgcctccttccacccaagtcactcattcatttggccagtaccagatgatgagggccgggccctggtgaccctcacctggctttcaggccatgggacagaggctgcctgccccaagccagggcctagtggagaggggcccaaggacagggcagcttcctccagttggcctaatcccctaccctcttggaaattcccttgggaggggtatgagggggcagcctgtctgattcctctcagcttccccctcagagccagccgggagcagggccagcgtggggaggcaggaggcgtttggcggggaaggagggccggctctgtttccagagttggctttccccagccggcgctggggaacatactgtcccaattaggagccctgtattgtgttgtatgtgttttcatggtttttggggggagaagtggggaggggaggatactgtcaatcctgcagcaggcagggctcaatcaagggtgccctgtctctagtgctgggctgtgccgtgggtcatccacgacagcccatccccaactctctctctgctttctggacaggggtgtgatgacccgtaagccctgggctgccatgtgggggaggaccctgggccccaccttcagcacctgtctgatggaagaggccaggtccagggtgctcagagtcctctgggcagtcagctggaacctggaaatgggcctggcttgatgggggagaagacagagcaatttgggcagctttggcccccaggtgggagggtgcgggtggagtttcggagggtatgggtttgcctgatgggctggagcactaggcagggcggagtgttgagccccacatggtatggatggcaagtggtgagggcgaggcgtgggcaggtggttgaagagccacgagcgtcctctcccagcctcttgcctgttggcagcttagccccatcctctgagccccaggtctgggacagctgctctggctgtgcctgccccagtgggatcaccatgggtccctgtctcctccctccctccagaactatgctgccatgaagctggtgaagcccttcagctgaggactctcctgccctgtagaaggggccgtggggtcccctccagcatgggactggcctgcctcctccgcccagctcggcgagctcctccagacctcctaggcctgattgtcctgccagggtgggcagacagacagatggaccggcccacactcccagagttgctaacatggagctctgagatcaccccacttccatcatttccttctcccccaacccaacgcttttttggatcagctcagacatatttcagtataaaacagttggaaccacacagca

SEQ ID NO: 98 - DNA, 3181 bp, Homo sapiens
actcagtgttcgcgggagcgccgcacctacaccagccaacccagatcccgaggtccgacagcgcccggcccagatccccacgcctgccaggagcaagccgagagccagccggccggcgcactccgactccgagcagtctctgtccttcgacccgagccccgcgccctttccgggacccctgccccgcgggcagcgctgccaacctgccggccatggagaccccgtcccagcggcgcgccacccgcagcggggcgcaggccagctccactccgctgtcgcccacccgcatcacccggctgcaggagaaggaggacctgcaggagctcaatgatcgcttggcggtctacatcgaccgtgtgcgctcgctggaaacggagaacgcagggctgcgccttcgcatcaccgagtctgaagaggtggtcagccgcgaggtgtccggcatcaaggccgcctacgaggccgagctcggggatgcccgcaagacccttgactcagtagccaaggagcgcgcccgcctgcagctggagctgagcaaagtgcgtgaggagtttaaggagctgaaagcgcgcaataccaagaaggagggtgacctgatagctgctcaggctcggctgaaggacctggaggctctgctgaactccaaggaggccgcactgagcactgctctcagtgagaagcgcacgctggagggcgagctgcatgatctgcggggccaggtggccaagcttgaggcagccctaggtgaggccaagaagcaacttcaggatgagatgctgcggcgggtggatgctgagaacaggctgcagaccatgaaggaggaactggacttccagaagaacatctacagtgaggagctgcgtgagaccaagcgccgtcatgagacccgactggtggagattgacaatgggaagcagcgtgagtttgagagccggctggcggatgcgctgcaggaactgcgggcccagcatgaggaccaggtggagcagtataagaaggagctggagaagacttattctgccaagctggacaatgccaggcagtctgctgagaggaacagcaacctggtgggggctgcccacgaggagctgcagcagtcgcgcatccgcatcgacagcctctctgcccagctcagccagctccagaagcagctggcagccaaggaggcgaagcttcgagacctggaggactcactggcccgtgagcgggacaccagccggcggctgctggcggaaaaggagcgggagatggccgagatgcgggcaaggatgcagcagcagctggacgagtaccaggagcttctggacatcaagctggccctggacatggagatccacgcctaccgcaagctcttggagggcgaggaggagaggctacgcctgtcccccagccctacctcgcagcgcagccgtggccgtgcttcctctcactcatcccagacacagggtgggggcagcgtcaccaaaaagcgcaaactggagtccactgagagccgcagcagcttctcacagcacgcacgcactagcgggcgcgtggccgtggaggaggtggatgaggagggcaagtttgtccggctgcgcaacaagtccaatgaggaccagtccatgggcaattggcagatcaagcgccagaatggagatgatcccttgctgacttaccggttcccaccaaagttcaccctgaaggctgggcaggtggtgacgatctgggctgcaggagctggggccacccacagcccccctaccgacctggtgtggaaggcacagaacacctggggctgcgggaacagcctgcgtacggctctcatcaactccactggggaagaagtggccatgcgcaagctggtgcgctcagtgactgtggttgaggacgacgaggatgaggatggagatgacctgctccatcaccaccacggctcccactgcagcagctcgggggaccccgctgagtacaacctgcgctcgcgcaccgtgctgtgcgggacctgcgggcagcctgccgacaaggcatctgccagcggctcaggagcccaggtgggcggacccatctcctctggctcttctgcctccagtgtcacggtcactcgcagctaccgcagtgtggggggcagtgggggtggcagcttcggggacaatctggtcacccgctcctacctcctgggcaactccagcccccgaacccagagcccccagaactgcagcatcatgtaatctgggacctgccaggcaggggtgggggtggaggcttcctgcgtcctcctcacctcatgcccaccccctgccctgcacgtcatgggagggggcttgaagccaaagaaaaataaccctttggtttttttcttctgtatttttttttctaagagaagttattttctacagtggttttatactgaaggaaaaacacaagcaaaaaaaaaaaaaagcatctatctcatctatctcaatcctaatttctcctcccttccttttccctgcttccaggaaactccacatctgccttaaaaccaaagagggcttcctctagaagccaagggaaaggggtgcttttatagaggctagcttctgcttttctgccctggctgctgcccccaccccggggaccctgtgacatggtgcctgagaggcaggcatagaggcttctccgccagcctcctctggacggcaggctcactgccaggccagcctccgagagggagagagagagagagaggacagcttgagccgggcccctgggcttggcctgctgtgattccactacacctggctgaggttcctctgcctgccccgcccccagtccccacccctgcccccagccccggggtgagtccattctcccaggtaccagctgcgcttgcttttctgtattttatttagacaagagatgggaatgaggtgggaggtggaagaagggagaagaaaggtgagtttgagctgccttccctagctttagaccctgggtgggctctgtgcagtcactggaggttgaagccaagtggggtgctgggaggagggagagggaggtcactggaaaggggagagcctgctggcacccaccgtggaggaggaaggcaagagggggtggaggggtgtggcagtggttttggcaaacgctaaagagcccttgcctccccatttcccatctgcaccccttctctcctccccaaatcaatacactagttgtttct

SEQ ID NO: 99 - DNA, 47191 bp, Homo sapiens
gcactgcagcgccagcgtccgagcgggcggccgagctcccggagcggcctggccccgagccccgagcgggcgtcgctcagcagcaggtcgcggccgcagccccatccagccccgcgcccgccatgccgtccgcgggccccgcctgagctgcggcctccgcgcgcgggcgggcctggggacggcggggccatgcgcgcgctgccctaacgatgccgcccgccgcgcccgcccgcctggcgctggccctgggcctgggcctgtggctcggggcgctggcggggggccccgggcgcggctgcgggccctgcgagcccccctgcctctgcggcccagcgcccggcgccgcctgccgcgtcaactgctcgggccgcgggctgcggacgctcggtcccgcgctgcgcatccccgcggacgccacagcgctgtgagtagcgggcccagcggcacccgggagaggccgcgggacgggcgggcgtgggcgcgttccctggcccgggacgggaagcaggacgcgggccaggacgctcccagggcgaggctccggcgcggcacggcggccctgctaaataaggaacgcctggagccgcggttggcacggccccggggagccgaaaaaccccgggtctggagacagacgtcccacccgggggctctgcagacgccagcgggggcggggcgcggaggccgcgctcagctgggaggacaaacagtcgctaattggagaggaattgggatgcggcctggggctgcggggtacccggagaggtggggatggctgtagggggcggcagggaagagttccaggaggtgtctggaaaaggatttgatggatgtgcaagaattgggctgatgcttaggaaggggcgatgaggtgggtccagaagaaggggggtgaacggtgtgagcaaagaccgtgaggctggaggctggccacgggaggtgtgaggggtaggggcagggtgggaggtgggctcgcgggtgggctggggtcatgaagggcctcaggcgctctgctattgggttccaaggctatcctgagaacaggggtgaggggggattgccgtggggggttaaagccttgtcatgttcgctttcgggagataaaaacaacaggtggcctttatggagacgctgcccagagccaggtctgtgccaggctcctgttgggggtcgtcatgcggaatcctgactctgaccatccgaggcatagggaccgtggagatttgcatttcacagatgaggaaacaggtttggagaggtgacacgacctgtcccaggcatcacagccgggatgtgcatagcaggggtttggaactatgaggtgcccaggacccagggttggattgaaaagggcggaggggactaagataagcagacagttgtccccagcgctggggagagtcttgggaccagtctgatgccttgtatttcccaggctccaggctcctcgccgggacagtgtctccttgggtgcgtgctggatccctgggggacgtggcacatccccaggcttgctaaacattgggtgggttctggcatttggttttgtaacgtttctgggtcactcccgcctgtggccacccttccttaggggagccgtgtgtccttggggctttgctgggtggtctcgagggtgggagaagaatgggttctcctggaccaatggagcccgtgcccctcggggccacattgctcctgcgctccctgactgcggacgcgtgtgtctcgcggctgtctctgtggagatggcctcctcctgcctggcaacagcacccacagaattgcatcagacctaccccacccgttgtttgtgatgctgtagctgagggctcctctgtctgccaggccggtcactggggactctgtccagggcctggtggttcctgcttcccagcacctgatggtgtccatgagagcagcccctcaggagctgtccgggagagaagggcgctggtggctgctgagcggagagcaaggcccgtgttctccaggcccttggcacagcagtggagcccccgcccctgccttgtgttgtcctcttaggctctggtcctggggtttggaggagggggaccctgggagttggtggcctgtcccagcctgagctggcaagattccgaatgccaggccccccaagtgtgcaacagggcacagggtgacctcatgtgggcaggtgggtgctgttctgtacacacctggggccgccgctgggagagttctggaaggtggggtgaggggacccatggcaaactagggccttaggaaggatgtgaaggccctggctggccccccaggccaccctctgtgctgtggggcagcccagccattttgctgtctaccctgcaaactcctcctcggggagacggctgggttttccccagggaagaggggtcaagctgggagaggtgaaggacacagatcacagctgctggcaggtgttcaagggtccaagagcgttgctgtctgggtgtcaccagtagccttcctggggggctcacgcaggtgcctctccacttgtggctccctggctgctgaagctcagcagggacagctgtgtccagttccaggtggaggacagccggggcttctgaggccacagcctgccttgggttaatgatgctgccgagaggtggtggcttttggaaaagatggcgtactgcaaaacgtgctgctctgcgtggctcgaagcttcgtggggagacgtgggcagagccgtggctgactcacagaccccccaccccagagcctgccctgccctccctgccccgacccttctccctcctgacccatgtgttttttttttttttttttttttttgagacagagttcactcttgttgccaaggctggagtgcaatggcacgatctcggctcatggcaacctccgcctcctgggttcaagcgctttttcctgcctcagcctcccgagtagctgggattacaggcgtgcaccaccatgcctggctaattttgtatttttagtagagacagggtttctccatattggtcaggctggtcttgaactcctgacctcagatgatccgcccgcctcggcctcccaaagtgctgggattacaggcatgagccaccacgcccagccctgacccatgttttgaaccaaattccagccacccttttatctgcaagcattttggagggcatcgcaatactgcagacccacctaacacaacagacagttccttcatgccaccgaaggcctggtgtgttcacatttttggtttaatagtttgaattaagagccaaataaggtccacacactgcaattagttgatgtctttttttttttctttttttttttttttttgagacggagtcttgctcttgtctccaggccgcagtgcagtggcatgatctcagctcaccgcaacctccgactccctggttcaagcgattctcctgcctcagcctcccgagtacctggtagctgggtttacaggcatgcaccaccgtgcccagctaatttttgtatttttagtagagacggggttttactgtgttggccaggatggtctcgatctcctgacctcgtgatctgcccacctcggcctcccaaagtgctgggattacaggcgtgagccaccgcacccggccaatgtcttttaaaaatatatactttttttttttttttgagacggagtttcgctcttgttgcccaggctggagtgcagtggcgcgatctcacctcacggcaacctccgcctcccgggttcaagtgattctcctgcctcagcctctccagtagctgggattacaggcatgtgccaccatgcctggctaattttgtatttttaggagagacggggtttctccacgttggtcaggctggtctcaaactcctgacctcaggtgatccgcctgccttggcctcccaaagtgttgggattacaggtgtgagccaacgcgcccagacaaaaatatatgtgtgtctttaaggctggtcaagcaaagcagtaggactggagaaagaatgaagaattctacctggctgtgatcaattcgttgtgaacaccactgtgcttggaccagctagctgatgtcttttgttttgttttgtttgagacggagtctggctctgtcacccaggctggaggacaatggtgtgatctcggctcactgcagcctccatctcccgggttcaagcgattctcctgcctcagcctcctgagtagctgggattagaggcgcgcgccaccacgcccggctaatttttaaaaatatttttagtagagatggggtttcaccatgttggtcaggctggtcttgaactcttggccttaggtgatctgcttgcctcggcctcccaaagtgctgggattacaggtgtgagtgatgtattttatttatttatttatttatttatttttattatttgagatggagtctcactctgttgcccaggctggagtgcagcagtgccatctcagctcactgcaagctccgcctcctgggttcacgccattctcctgcctcagcctcctgagtagcctggactggtgcccgccaccatgcccagctaattttttgtatttttagtagagacggggtttcaccgtgttagccaggatggtctggatctcctgacctcgtgatcctcccgcctcagcctcccaaagtgctgggattacaggcttgagccaccgcctgtcttttaaatgtccgatgatgtctaggagcttcccttcctctctttttccttgtgcaatttgttgaagaaactggctcctgcagcctggatttctcgctgtgtcttgggggtgccacctccatggtgtcacctccgtggtgctgtgagtgtgtgctttgtgtttcttgtaaattggtcgttggagccgacatcccattgtcccagaggttgtcctggctggcactggcctaggtgtagatgtcatcagctcagggccccctgctctaaaggccacttctggtgctggttgccactcaccctggctgggggtcacctgggtctgctgctgtctcgcaaatgctggggtccaggactgggcacatcgagggacttggtaggtgcttggttcactgatgtaaaatataggagcacccggggccttgccctttcccacctgcatccctgaatgacaggagagtgtgggagagtgtagggacagcaggcgcagaccccggggcccctgcctgggattggcgtcggggaagacaggcattctggagcgacccctaggcctgatgccttagagcgcaactgccagagacacagcttccttggggggctggccaggccacggaggggcccctggctcccatttctggtccctggatcctgagagcgaggactagggattgtcaccaaggcctccatgagccctcagcagaaggagggccaccctcgagggctccgttatcactggagcccgcgttcaaccaacacgcagatgattctccaaggacagagatggatgatggggagggggctggcctggaaggacccccagtgcaggtgacattgaagccaggtttcaaagctcccacagggagctgcccagagagagtccccaaggggcaaggtgactcgggggcaggggtagggcctctgtcaggagagcctaggagaggcctgtgtcttctaggaagagccctggcagccgagcggaggcagtggtgaggacctgcatcctgcatgtccagctggcctcacccggggtccctgagccgggtcttacgtggctcccgcactcgggcgttcagaacgtgcctgcgtgagaaacggtagtttctttattagacgcggatgcaaactcgccaaacttgtggacaaaaatgtggacaagaagtcacacgctcactcctgtacgcgattgccggcaggggtgggggaagggatggggaggctttggttgtgtctgcagcagttgggaatgtggggcacccgagctcccactgcagaggcgactgtggagacagagagcacctgcaggtcatccatgcagtatcggcttgcatccagatcatacagggaacactatgattcaacaacagacagggaccccgtttaaacatggacaaggggtcactcacgcctggaatcccagcagtttgggaggccagggtgggtggatcgcttgagcccaggagtttgacaccagcctgggcaacagggtgagaccccggtctctaaaaaataaaagaacattggccgggcgtggtggtatgcatctgtggtcccagctattcaggagactgaggtgggacatcacttgagccgaggaggtcaaggctgcagtgagctgtgatcacaccactgcactccaggctgggtcacagagcaagaccctgtctcaaaaaaaaaaaaaaaaaaaaaaaaaaatcacaggatctgaacagagatttctccaaagaagacgcacagatggccaacagcgtgtgagaagatggtcggcctcattagtcatgagggaaacgtaaatcaaaaccactgtccagccgggcgcggtgcctcacgcctgtaatcccagcactttaggagagcagatggcttgaggccaggagtttgaggccagcctgggcaacatagcgagaccaataaatagatattagtggtggcgcctgtagtcccagctagttgggaggctgaggggggaggattccctgagtctatgaggttgagactgcagttagctgtgatggtgccactgcactccagcctgggcgactaggaaacggtctttaaaaaaaaaaaaaaaaaacagggtgggcgcggtggttcacgcctgtaatctcagcactttgggaggccaaggtggggggatcacaaggtcaggagtttgtgaccagcctgaccaacatggtgaaaccccgttctactaaaaatacaaaaattagcgaggtgtggtcgtgggcgcctgtaatcccagctaattaggaggctgaggcaggagaatcacttgaacccgggaggcggaggttgcagtgagccaatatcacaccactgcactctagcctggtcaacagagcgagactctgtctcaaaaaaaaaaaatgctgagcgtggtggcgcatgcctgtagtctcagctactttgggggctgaggcaggagaatcgcttgaacctgggaggcagaggtcgcagtgaggcaagattgcaccattgcactccagcctgggagacagagtgaaactctgtctcaaaaagaaaaggtctaggaagagtccgcaccctctccccgcggtggccacgccgggctccgcgctgagccctctgtgttcttgtctctccatacctcatcacggcaccgcagggttgcagccactcctggtctcattttacacaccaggaaattgaggctctttgagaagccgtggtgatgatttcatcagcatgctctggggcagacccctgcagccgcacagggtgcctggggcccacactagtgccctggtttatagacagacagaggtggcagtggcgcttccgagtcgggctgcgatgtgcttgcactccccgaggggctgaggggccctgcgcccaggtgcagctgcttgggtgctgccagcccctcccacctctccctccctgccagcccctcccacctctccctccctgccagcccctcccacctctccctccctgccagcccctcccacctctccctccctgccagcccctcccacctctccctccctgccagcccctcccacctctccctccctgccagcccctcccacctctccctccctgccagcccctcccacctctccctccctgccagcccctcccacctctccctccctgccagcccctcccacctctccctccctccagcccctcccacctctccctccctgccagcccctcccacctctccctccctgccagcccctcccacctctccctccctgccagcccctcccacctctccctccctgccagcccctcccacctctccctccctgccagcccctcccacctctccctccctgccagcccctcccacctctccctccctggctcatccctgctgtgtcccttctctctagtttcctgttcagtttcaggaaggaggctgggaacccagatgtagggaatttgcgccctggagtcagacctgggttcacgtcccagcgcctccacctctggtgtgaccttggtccagtctctcagcctcagtttcctcacctgtaaagtgggctccatgattagatgcaccctgcagggcagtgtagcagtgacctggctcagccactggcagccccaacaatcataccttgttaaagtagctctgtcggttccctcaggggttccgggggcccattcccctgtcctccatgcactgtgagacctgccctgccacagagcagagtgtaacagcctgagggtgagagccagacactgtgcctgtgcttagaccagacactggacgacgggagccagtgcagcctgggcgggtggactcctatggacccctcagcacccagcctcggtgccttcagcgcagggccgcgtggctgtgggggctcacaagacccggcccactcctgcttgtgcctacatctgggtgtttgcccattggtgccttttgacgcgttctggtgtgtgtgagacgtgcggggctgggaagtgttggcagagccgcgagtaccgtcctcactccttttgttcttttgacgtaagctggcgagtggcactgcctgagttccgctcagtgcccgccctgatgtgcggaccccgctgcattcttgctgttaggtggtggcggtgtgcgctgtcgctggtgggcaccgagagtctttgggagctttggggaggttgtgccaagcctgagcctcgacgtcccccttcccggctttctgttggctcttctgaggccagggcatctctatgagggcctcctgctggagccgtctctgtggatctcctctgccatcctggcccatgagtgggtgatgcgctggccaccatctggtgacagtggccgggcaccgctgccaaatgtgggtcccgcatctgcaagcccctccctgggtcccctagggtatggggtggttctgccactgccctcgctcccccaccttggggtgcctctccccctgctcgtgggggagaccctgcctgggatctgctttccagcaaggaatatactttggagggagacacacatgttcttttctggagctctgcagtggccacggcagcccagcccgccaagcaccctggaatgaaaacatcccgctgctgtctgggcctggcctgcactctgctgcctgcgctccagctggctgaggccgggcacgtctgcgggcacagcagcgggggcgccacagtctccctgcagagtgagcgcagctggaaaatgcagctcacgccctttcccagaacacctcgctcttcatggcttggcagctgtccttgcctaggggccagggtgcccaggcactggtggcaggagaagggctacatctggggctgaggcgggctgggtccttttctccctgcagctcccgaggcccagccctggcccagcctggcattcctgaccttagcagcgccatgatctgaagacaggctggcttctgtgaggccacctcagaaagggctttgtgcccaggcagaggcggaagccagctcttccttctggttgaggcaggaatgaggccagcgctggggcaagcccatgcccagggaacgtcacagctgtgggagtacaggggctccgggttctgagcccgtccactgtgcatcgtggccctggcctcaggatggctcgtaccatcattggctgtgcccacagccgagtgggtgatgggattccggctgccccgctggatctgtgctgctgccctctccagggcactgctgtgcccgcacagccgggcgcagatggccagtttgcttgcccccccccccaccatcctcttcctaccttggcttcctccattgacacactggaccctgctggctgcccggggaggtgtttgggggatggtgttgggggaggaggagggccccttgagcctcagtgtgcccatcaggagcgtaaggtcagtgcagcacctgcccacacaggctgtgaagggtgggagtggagagggatgcaagggggtcacaacgcctggctccatgtcagctgcgtgcaggggcaccaggagccggccctcattctccccttgaactggaagggtggccccgaccccagcggcaggtagcatacgtatgaagcgctctccttcctacaccccacaggtgggctcgtctccagacggccctttttgagctggctgtgtttttccatctgtgtaggcaaggacatcgcagactcccctttctcatctccctcgttcagcctccgaggccggagtctccatccctgtgcctgcctgtgggtcccgggaggacctgaggctgcccatgtcacccccggcatctcatcctggggacagttcagccgtgggagggatctgtaaggacagaatgccgctgagcctggggctccccagctagtctcacaccccgtgtctgggacccagagaccctcgtgcagggctctgttgcttggggcctggcagcctcgtcctgtatcagaggctgccacccccacccctcgtggggccagggttgtggccggcctccctggccctccccatggaagtggtaggcggagccagcagccatctgcccagcccggggctgcactgttttttttcaaatgagcaccgtcccaaactgcagcccgttaatttaaacaggatcatttccggccctggaagccgcctcactctccttaaatagaaaggagcacagcgcagagggaaacagatgaggtcatggctcggctggcccagcgaggaaggggccgcagtgggggtggcactgccgcctgtcccctgtcctctccagcgcccacactgcagcccatttcctcaccctgggcctgctctcgggagggacgggcctgggggtcctcttgctgggcggaggggaaccagctcctccaggagaggacggggcctggcagggggcatggggcctccctgggtctggcgtcctgtcctgcccctgccgagggaggagcggttacataagctccgcaggcggcccctccgagccggtccccccagcccagtttccagtgaggcggccagcgcgggcgggggtgccgggcctggcgcacacccgctgctgaccacacgtgtctggaatgtgcagatgtttctttgggggctccgtccggcccccagaccccactcagcatctggtctggggagtgggcgcctggggcactcagctctgagtgtgagactctgaggcaggtctggtttgtctggggccattccctctgctgtggattgggagggccccgggagctgccccacacccagggaagttctcctcagtcccactgttgcattccccgaccccggctcccccggcccaggagcgcctgtggggcagaaggcccagccccaagacttcccggccctgccagcctcaggcttcacccaccctcgcgccaactgtgggcagagcccagggggagggcaggagagccagcgcctggctgggaacacccctgaggggccgaggctccagggcgagggggcccgacctggggttcacacgcccgggtggcgggcagacccgctgcagcatgagacacgtgtcagctacctcgggccggcaggctggccctgctgcccacagccctgggacgtggccccacctgtgacgggtgtggaggggcagcctccaggcctggccacaccctctgctgttgctgctcctgctccaggattggcaagggtgctgggaaggggtgaagacccgtactgtggccacacacctgggacttccttctccacccagtggtgccccagcagccgctaaggagcccgctgggtcccacgctaggatggtcctaactcctcccgccttccagatcggacgctcggcgctggggaccccttgtgtcccggggctggggcaccgtcctgccccccatgggggtgtactcctcccgacaagcttggcttcagcttccctgggagcacatcctggccctcgggcacccatcaggctgtccctgtgcacctggctcccacccttccagctcatagcaggaactggggtgaggagtgcgtggggcagcaagggcctgggaccccagaggaccctgcactctgctctgtgctcttgcctgggcttagggccgctcggtggtcctgctgccagatgcctgggccctgctgtgtcccccatccttgcagggaaccagaacgtgggggcagggcatcagacagcggcgatgatgtcacctggcgggtgcagaggaagcccgaggggcggggtgggggggctggcgcgaggctgcctggctaggccttggcgttcccccagaacggcgatggcaaaagcagatggagacgtgaaaaagtacgggagcaagcgaggtgaggactccacggggacccctgtgctgttccctgtccctgaagcccacacctgagtcctgcccagggcagatgcttccacacccagggggcacctgagtcctacccagggcagacgcttccacaccctgggggctgggggactgcacctggctcctgtctgggccccagcttcattccactgccctgggccctgggagctcggccgagcggggtccccaagaccttgctgcatttctgggccttgggctggggtgagggccgggagaaggagccagcctggagcctggcacgcagggagtgcatggccagaaccggtgacaggcagggctgcctgctggcgtggaagaagtgtccatggcacccccaggcctggttcacagtgggatgggcggggagccggggggctctggggtcctcggctgacctgcccccacccctgccctggcttgtcagctcccagcagcagccactcttgatggattttccagaaaatgaggtgtggccaaacatcttcaggcttttccttctttcctttctcccgtggcctgggtgggagctgctccccatgcctgggggcaggtgcgagagcctgtgcccctccctggggcagtttcacagctgtgtcccttccagggggcctgcctgtgttcaccgtggcctctgcagcacctctcgccccttagggctcctgcgcctcgggtcccggtgcctcatttctccctaaagcattggttctgctgccgccgcagccgctggaaagtccctcctcaggtctaactgcagttcctcacggcacagtgttccccctcgggcatggtgcttgggcagtgggtgtgagtccagctgcctcaccctgtctcgagaatggcctcttgctggtctcccagccaccaccctgtcccaccccacggcggggatggtgtggatgcctagcagcgcggctgtgggcccacccatccttatgggcagtggggagcacctcagcccgtgtccctaccttggtgtagaggaggggacggcagagaagcagggttcagttaggggggaagtggtggccctgccggaggggccgttccctgtgtgcctggcccccagatcctctcccctcccggagcccagggcacaggcataggctctctgagtgtcccacagcccctgggggaagggaactgcacccccaaccgtgccctccatccgcagatggaacgagaagctccgggagccagtgcccagcgtctcatctgtctgggcacccagcccaggtgagggcctggctccaccgtccgtggctggtgctgcttcctggcacggagaaggcctcggctgctctgtcccctcagctggggtggcctctggtccccttctttgttggttcccttctcaagctcttgccctggccccgggccccaccgggcagcctgtgtgtgcgtctctcctgcgccgggtaggctcctgtgggagcggagctccggtgggaggagcagggctggaggctggcaggggctgggcgggtgttcagggatggaggccgccccggcttggggctggctgccgggtggtcattgctgggaagagcaagtctaggcggaggcacctgctgggtcactcgtggggagggtgacacctggggaagtagaggcccgtggcaggaggtgaggcctcggggtcctggggagcaggggggtggtgtgcagacctgcggagccatagtcctgtgccaggagcactactgggagtgcgtgggaccaggaggggtgcccagggtgggcggcagagtgacccccgaggtgcttgaggccgaggggaggtggagttctcggtttgccccagctctctgtctactcacctccgcatcaccagctccaggacctggtttgtaactcgggcagctctgaaaagagagacatgctgccgccctgtggtttctgttgctttttcttcactgactactgacatgggatgtttttcctacggctgtgaccaattgtgcttcttctaattgcctggtttttctttttttgtttttggagttttctctttctttcctccctccctctcaccctccatcctttttttttttatttttattttttgagatggagcttcactcttgcaggatggggtgctggagtgcaggggtgcgatctcagctcactgcaacctctgcctcgcgggttcaagtgattctcctgcctaagcctcctgagtagctggaattacaggtgcttgccaccacgcccgactaattctgtagttttggtagagacagggtgtctccgtgttggtcggtctggtcttgaactcctgacctcaggtgatgcgcccgcctcagcctcccaaagtgctgggattacaggcaggagccattgcacccggctctttccccttctccttttcttctctctctcctccctttctttcttttcttttcttttttttttcttttgagatggagtctcgctctgtcaccaggctggattgcagtggcgtgatcttggctcactgcaaccttcgcctcccgggttcacgtgattctcctgcctcagcctcctgagtggctggcactacaggctcccgccgccatgcccggctaatttttgcatttttagtagagacagggtttcaccctgttggccaggatggtctcgatctcttgatctcatgatccacccaccttggcctcccaaagttctggcattacaggagtgagccaccgtgcccggccatctttctttccttgctttctctttgttttctttcgagaccgggtcttgctctgtcgcccaggctggactgcagtggcacaatcatagctcactgcagcctcgacttccctggctcaagcgatccttcctcctcagccccccgagtagctggaactacagttacacactaccatgcctggctgattctttttttccttgtagagatggggtcttgctatgctgtccatcctggtctcaaactcctggccttcccaaagcactgggtttacaggcataagccaccacacccagtttccttttcttctttttaactggaatagttgacgttttctttattagctgtgtgtcaggagggtatttttggcctttagtatgtcgtgtaagttgctagtgcttttctgagattgtagtttgttttctaattttatttatattttgcgtagaagttgtgtattttagatggagttaggtcggctggtctttgatgttttatttattaattatgtatgtatttatttatttttgaggtagagtctcgccgtttcacccaggctggagtacagtgatgcgatctcagctccctgtagccttgacctctctgggctcaagtgatttttctctcctctacctcccgagtacttgggaccccaggcgcatgccgccatgcctggctaatgtgtattttttgtagatacggggtctcactgtgttgcccagggtggtttcaaaatcctgggcccaggcgatccttccgtctcagctcccacggtgctgtgttaccggcgtgtgccccagtgcctggccgtcttggaggtcttgtttctctgggtttatgcctcgaggtggcgcctgctcccctgtgctccctggtagcctggtagtgagcctgcttctcacacagtcatacctggttgtggtcccacagtgggaccaccctgttgggttcagaacaggagatgggggcccctcgagtctgtgtgggggctgtggacagggttgggagaccttggctctgtgggggactgtggacaggggatggggggccttggccctgcgtgggatgggttgggggtccgtgcccttcctggccctgggtggacaggtccatgtggcactcggcatagggctgagatgggtgcagagggctgaggcccccaggcctctcctggcttggtttccccagatgagtgttcatttgggtcttccatcagaaagtcccctcctgacctctgggagtggggagctcaagggtgggaggccatagcttggggatgctggcaatgtgtgggatgggcccagggatggcctctggcctactaggggctctggccctgacccacggccactcactcctcagagacgtctcccacaacctgctccgggcgctggacgttgggctcctggcgaacctctcggcgctggcagagctgtgagtgtcccccagtcgtgccagcatgcggggctcactccgggtgggctggcggcaccgcctcttgctgctcagctgtgggggcttccatcagctttgccgaatcccccgtctcttccagggatataagcaacaacaagatttctacgttagaagaaggaatatttgctaatttatttaatttaagtgaaatgtaagttgtggttctttgggtggggtcctggctggaccccaggcccccaatatcccttctgccctcccagttggtccgtgtccccttccaggcttgagaccagatcctgggggcagttcactgcctgcttggagccccccagtgccggcttggttggggcaggggaggcggtgctgtcagggtggctccagggcctggttgccagtggggggctggcatagacccttcccaccagacctggtccccaacacctgcccctgccctgcagaaacctgagtgggaacccgtttgagtgtgactgtggcctggcgtggctgccgcgatgggcggaggagcagcaggtgcgggtggtgcagcccgaggcagccacgtgtgctgggcctggctccctggctggccagcctctgcttggcatccccttgctggacagtggctgtggtgagtgccggtgggtggggccagctctgtccttcccagccaggtgggacctgggccctgcagacactgggcagggctcaggaaggcctctctggggggggcctccgggccaagggaacagcatgggagcctgtgagtgcggcgggcggatgtgggggcgtggggtggagccaggaggagcagaacccggggtccagtggctgcctcttctaggtgaggagtatgtcgcctgcctccctgacaacagctcaggcaccgtggcagcagtgtccttttcagctgcccacgaaggcctgcttcagccagaggcctgcagcgccttctgcttctccaccggccagggcctcgcagccctctcggagcagggctggtgcctgtgtggggcggcccagccctccagtgcctcctttgcctgcctgtccctctgctccggccccccgccacctcctgcccccacctgtaggggccccaccctcctccagcacgtcttccctgcctccccaggggccaccctggtggggccccacggacctctggcctctggccagctagcagccttccacatcgctgccccgctccctgtcactgccacacgctgggacttcggagacggctccgccgaggtggatgccgctgggccggctgcctcgcatcgctatgtgctgcctgggcgctatcacgtgacggccgtgctggccctgggggccggctcagccctgctggggacagacgtgcaggtggaagcggcacctgccgccctggagctcgtgtgcccgtcctcggtgcagagtgacgagagcctcgacctcagcatccagaaccgcggtggttcaggcctggaggccgcctacagcatcgtggccctgggcgaggagccggcccgaggtgagtgtctgctgcccactccccttcctccccagggccatccagatggggcagagcctggtacccccgtcttgggcccacactgaccgttgacaccctcgttcccaccggtctccagcggtgcacccgctctgcccctcggacacggagatcttccctggcaacgggcactgctaccgcctggtggtggagaaggcggcctggctgcaggcgcaggagcagtgtcaggcctgggccggggccgccctggcaatggtggacagtcccgccgtgcagcgcttcctggtctcccgggtcaccaggtgcctgcccccaccccccgaggggccataggttgggagatctctgaagcactggggcagagcctgcggctggggagtctcaggaggaaggaggtgggagctgggccggccctggtgagcaggtggcgccggccggtggggccgttcctgtcagctctgcagatgcagaggtggacatgagctgggggcagcctccggacactcctgggcacgccatacgggaggtggcctgcacggggatccctgccggtacccacaggccccgtgggtgggtgctgctgtgagcctgggctggtgggccctggtctccgggctctgagcctcagtttccccatctggaaagggggacagtgatggggctcccagcgggctgctgtgagggtgggaggatggaggagtgccctgagccccctgccatcccacacccgcccccaggagcctagacgtgtggatcggcttctcgactgtgcagggggtggaggtgggcccagcgccgcagggcgaggccttcagcctggagagctgccagaactggctgcccggggagccacacccagccacagccgagcactgcgtccggctcgggcccaccgggtggtgtaacaccgacctgtgctcagcgccgcacagctacgtctgcgagctgcagcccggaggtgtgcggggggccaggcaggggcctgagacgctggctgtggttaggggcctgccgagcgcccgcggtggagcctgggctgaggaggaggggctggtgggggggttttcgggcggctcggtccccagtctgttcgtcctggtgtcctgggccctggcccggcgcctcactgtgcactcgccaccccaggcccagtgcaggatgccgagaacctcctcgtgggagcgcccagtggggacctgcagggacccctgacgcctctggcacagcaggacggcctctcagccccgcacgagcccgtggaggtagtcggccccccacgttctacaacctgccctcctgcctgcccctggaggccttgcctgccctgcccactgtgggtctcgccaaaaaacttgggggccttaatgttgcttgtgcccagtgaagatggttgggaaaatccagagtgcagagaggaaagcgtttactcacattacctccaggccttttctctgagcgtgtgtgagttattcctgaaaggcaggtcaggggtcctgccccccatggacagtttccaccggagtcttcctctcgagcgacaggagccaggcctgtgggggtctgatggctcgctctccttccctcccctcttcctgggaagttcgggtagggggagtctgggcttcaggctgggatggggtctgtggagctgaggcggccccctgcccaccaggtcatggtattcccgggcctgcgtctgagccgtgaagccttcctcaccacggccgaatttgggacccaggagctccggcggcccgcccagctgcggctgcaggtgtaccggctcctcagcacagcaggtgggactctgggtggtgggtggtgggtggtgggcgccgcaggactcggggtggcctctctgagctttcacgtctgctggtcctgtggccaccagagtggttcccagtcttaggtggacagagcaggggttccagagacaccagctcattccaggtgtcctgggggtggattgggtggggcctgcctgggggccggcctgggtcagtcggctggccggagacggacgcagcactgggctgggagtgctgcccaggtggggagacctgtcctcacagcaaggccaggattgctggtgcaggcagttgggcatctctgacggtggcctgtgggcaaatcagggccccaacaccctcccctcctcacagggaccccggagaacggcagcgagcctgagagcaggtccccggacaacaggacccagctggcccccgcgtgcatgccagggggacgctggtgccctggagccaacatctgcttgccgctggacgcctcctgccacccccaggcctgcgccaatggctgcacgtcagggccagggctacccggggccccctatgcgctatggagagagttcctcttctccgttcccgcggggccccccgcgcagtactcggtgtgtggccctgacctgggtctgttccctgcatctcctcaggccaccttcctgtctgctgcccagggtctgggtctgtgcaccagacacacccagcctgcaggcccctcccacgtccttgccacctctgacctccgacctctgcagtgccctcggccctctcccagtgggagaagctctcgcctgggcccttggcacgagctgtgcctcctcttcctctctcccagcacagctgctccttcctgtctgccaggtcttggcctgtgtcctctccccgtgtgtcccccggtctgcaactgtcctgcctgtccttgtcacgagcactgtggggaggctccttgaggtgtggctgacgaagcggggagccctgcgtgtccaccctcatccgtcgtgcgggggtccacgggccatgaccgtgaggacgtgatgcagccctgcctccctctccacaggtcaccctccacggccaggatgtcctcatgctccctggtgacctcgttggcttgcagcacgacgctggccctggcgccctcctgcactgctcgccggctcccggccaccctggtccccgggccccgtacctctccgccaacgcctcgtcatggctgccccacttgccagcccagctggagggcacttgggcctgccctgcctgtgccctgcggctgcttgcagccacggaacagctcaccgtgctgctgggcttgaggcccaaccctggactgcggctgcctgggcgctatgaggtccgggcagaggtgggcaatggcgtgtccaggcacaacctctcctgcagctttgacgtggtctccccagtggctgggctgcgggtcatctaccctgccccccgcgacggccgcctctacgtgcccaccaacggctcagccttggtgctccaggtggactctggtgccaacgccacggccacggctcgctggcctgggggcagtgtcagcgcccgctttgagaatgtctgccctgccctggtggccaccttcgtgcccggctgcccctgggagaccaacgataccctgttctcagtggtagcactgccgtggctcagtgagggggagcacgtggtggacgtggtggtggaaaacagcgccagccgggccaacctcagcctgcgggtgacggcggaggagcccatctgtggcctccgcgccacgcccagccccgaggcccgtgtactgcagggagtcctagtggtgagtatggccgaggctccaccaccagcccccaggcaggtgcctgcagacagggtgctcacacagggcgtgaggcctggcttcccagtgagggcagcagcccagttactggggacgtcggccccgggcaggtcctgctggctggctcctcgggctacctggtgggctttaaattcctggaaagtcacggctctgacagtggctccgctaactcattccactgtctcatttcacaaaatgaatttaaaactctgctccctgacctcacacgagcccccgtgagtctctcacgccctctgctgtgttctcgcctggctaaagcgagtggcttttgaggtggagtctgaacccctgatgggaaactgcgggctgcccgcggtgccaccatgctgggtacatgggggacagggctgtctccatcttgcgggtacctgcctcttcaccaggggccttgggaggggccatcagaaatggcgtgacctgtgcagcctgtcctgggttctgtaagccagtgtaggtgcctcccctcactgctccgagctctctgggtgaggagctggggcaagagcgccgggagggtctgagaagactcagagagaggtggactctttgtagctggtactaggtttgctttacagatggggaaactgaggcacagagaggttgaggcattagtagtactacatggctggctggagagccggacagtgagtgtcccagcccgggcttggctcccatggcatgcagagccccgggcacctcctctcctctgtgccccgcgtgggactctccagcccgacgggaggtgtgtccaggaggcgacaggctaagggcagagtcctccacagagcccaggctgacaccattccccccgcagaggtacagccccgtggtggaggccggctcggacatggtcttccggtggaccatcaacgacaagcagtccctgaccttccagaacgtggtcttcaatgtcatttatcagagcgcggcggtcttcaagctctcagtaggtgggcgggggtggggaggggaggggatggggcggggcagggcgggggcgggctccaccttcacctctgccttctgctctgcttcatgctgcccgaggacgctgccatggctgtgggtgagtggagggagggacgccaatcagggccaggcctctcacctgccacctgggctcactgacgcctgtccctgcagctgacggcctccaaccacgtgagcaacgtcaccgtgaactacaacgtaaccgtggagcggatgaacaggatgcagggtctgcaggtctccacagtgccggccgtgctgtcccccaatgccacgctagcactgacggcgggcgtgctggtggactcggccgtggaggtggccttcctgtgagtgactcgggggccggtttggggtgggcaccaggctcttgtcccagccccagcctcagccgagggacccccacatcacggggttgcttttctgagcctcggtttccctgtctgttgggaggtaactgggtgcacaggagccctgaggctgcacgggagccgggagaggcctcagcacagccgggtgggccctgaatggaggcccggggcgtgactgcagagtggagcctcggctgggtcccaagcaccccctgccccgccaccgcccacccctgtcccggttcactcactgcgtcccaccgccccggcaggtggacctttggggatggggagcaggccctccaccagttccagcctccgtacaacgagtccttcccggttccagacccctcggtggcccaggtgctggtggagcacaatgtcatgcacacctacgctgccccaggtgagggatgagggggtgagggggccactgcctttcaggctctgagcacggggtccccccagctccccagtcaagctgccccccttcctccccaacagccctcactgtgacctcacctgggctgatggcttaggcccctactggggtgagggaggggccaggcgtggggggagtggacagggaagctgggcccctgaactgcgccccccgccctccccgggcctggctcttgctgctctgctgccccgagtgcagctgcacttggaggcggtgccgtcctcgccaggcagccctcagtgctgctacacctgtgctccgtcccgcacgtggcttgggagcctgggacccttaaggctgggccgcaggtgcagccgttcaccccgggctcctcaggcggggggcttctgccgagcgggtggggagcaggtgggggtgccgcggctgccccactcgggcctgtccccacaggtgagtacctcctgaccgtgctggcatctaatgccttcgagaacctgacgcagcaggtgcctgtgagcgtgcgcgcctccctgccctccgtggctgtgggtgtgagtgacggcgtcctggtggccggccggcccgtcaccttctacccgcacccgctgccctcgcctgggggtgttctttacacgtgggacttcggggacggctcccctgtcctgacccagagccagccggctgccaaccacacctatgcctcgaggggcacctaccacgtgcgcctggaggtcaacaacacggtgagcggtgcggcggcccaggcggatgtgcgcgtctttgaggagctccgcggactcagcgtggacatgagcctggccgtggagcagggcgcccccgtggtggtcagcgccgcggtgcagacgggcgacaacatcacgtggaccttcgacatgggggacggcaccgtgctgtcgggcccggaggcaacagtggagcatgtgtacctgcgggcacagaactgcacagtgaccgtgggtgcggccagccccgccggccacctggcccggagcctgcacgtgctggtcttcgtcctggaggtgctgcgcgttgaacccgccgcctgcatccccacgcagcctgacgcgcggctcacggcctacgtcaccgggaacccggcccactacctcttcgactggaccttcggggatggctcctccaacacgaccgtgcgggggtgcccgacggtgacacacaacttcacgcggagcggcacgttccccctggcgctggtgctgtccagccgcgtgaacagggcgcattacttcaccagcatctgcgtggagccagaggtgggcaacgtcaccctgcagccagagaggcagtttgtgcagctcggggacgaggcctggctggtggcatgtgcctggcccccgttcccctaccgctacacctgggactttggcaccgaggaagccgcccccacccgtgccaggggccctgaggtgacgttcatctaccgagacccaggctcctatcttgtgacagtcaccgcgtccaacaacatctctgctgccaatgactcagccctggtggaggtgcaggagcccgtgctggtcaccagcatcaaggtcaatggctcccttgggctggagctgcagcagccgtacctgttctctgctgtgggccgtgggcgccccgccagctacctgtgggatctgggggacggtgggtggctcgagggtccggaggtcacccacgcttacaacagcacaggtgacttcaccgttagggtggccggctggaatgaggtgagccgcagcgaggcctggctcaatgtgacggtgaagcggcgcgtgcgggggctcgtcgtcaatgcaagccgcacggtggtgcccctgaatgggagcgtgagcttcagcacgtcgctggaggccggcagtgatgtgcgctattcctgggtgctctgtgaccgctgcacgcccatccctgggggtcctaccatctcttacaccttccgctccgtgggcaccttcaatatcatcgtcacggctgagaacgaggtgggctccgcccaggacagcatcttcgtctatgtcctgcagctcatagaggggctgcaggtggtgggcggtggccgctacttccccaccaaccacacggtacagctgcaggccgtggttagggatggcaccaacgtctcctacagctggactgcctggagggacaggggcccggccctggccggcagcggcaaaggcttctcgctcaccgtgctcgaggccggcacctaccatgtgcagctgcgggccaccaacatgctgggcagcgcctgggccgactgcaccatggacttcgtggagcctgtggggtggctgatggtggccgcctccccgaacccagctgccgtcaacacaagcgtcaccctcagtgccgagctggctggtggcagtggtgtcgtatacacttggtccttggaggaggggctgagctgggagacctccgagccatttaccacccatagcttccccacacccggcctgcacttggtcaccatgacggcagggaacccgctgggctcagccaacgccaccgtggaagtggatgtgcaggtgcctgtgagtggcctcagcatcagggccagcgagcccggaggcagcttcgtggcggccgggtcctctgtgcccttttgggggcagctggccacgggcaccaatgtgagctggtgctgggctgtgcccggcggcagcagcaagcgtggccctcatgtcaccatggtcttcccggatgctggcaccttctccatccggctcaatgcctccaacgcagtcagctgggtctcagccacgtacaacctcacggcggaggagcccatcgtgggcctggtgctgtgggccagcagcaaggtggtggcgcccgggcagctggtccattttcagatcctgctggctgccggctcagctgtcaccttccgcctgcaggtcggcggggccaaccccgaggtgctccccgggccccgtttctcccacagcttcccccgcgtcggagaccacgtggtgagcgtgcggggcaaaaaccacgtgagctgggcccaggcgcaggtgcgcatcgtggtgctggaggccgtgagtgggctgcaggtgcccaactgctgcgagcctggcatcgccacgggcactgagaggaacttcacagcccgcgtgcagcgcggctctcgggtcgcctacgcctggtacttctcgctgcagaaggtccagggcgactcgctggtcatcctgtcgggccgcgacgtcacctacacgcccgtggccgcggggctgttggagatccaggtgcgcgccttcaacgccctgggcagtgagaaccgcacgctggtgctggaggttcaggacgccgtccagtatgtggccctgcagagcggcccctgcttcaccaaccgctcggcgcagtttgaggccgccaccagccccagcccccggcgtgtggcctaccactgggactttggggatgggtcgccagggcaggacacagatgagcccagggccgagcactcctacctgaggcctggggactaccgcgtgcaggtgaacgcctccaacctggtgagcttcttcgtggcgcaggccacggtgaccgtccaggtgctggcctgccgggagccggaggtggacgtggtcctgcccctgcaggtgctgatgcggcgatcacagcgcaactacttggaggcccacgttgacctgcgcgactgcgtcacctaccagactgagtaccgctgggaggtgtatcgcaccgccagctgccagcggccggggcgcccagcgcgtgtggccctgcccggcgtggacgtgagccggcctcggctggtgctgccgcggctggcgctgcctgtggggcactactgctttgtgtttgtcgtgtcatttggggacacgccactgacacagagcatccaggccaatgtgacggtggcccccgagcgcctggtgcccatcattgagggtggctcataccgcgtgtggtcagacacacgggacctggtgctggatgggagcgagtcctacgaccccaacctggaggacggcgaccagacgccgctcagtttccactgggcctgtgtggcttcgacacaggtcagtgcgtggcagggccgtcctccatgcccctcacccgtccacacccatgagcccagagaacacccagcttgccaccagggctggcccgtcctcagtgcctggtgggccccgtcccagcatggggagggggtctcccgcgctgtctcctgggccgggctctgctttaaaactggatggggctctcaggccacgtcgccccttgttctcggcctgcagagggaggctggcgggtgtgcgctgaactttgggccccgcgggagcagcacggtcaccattccacgggagcggctggcggctggcgtggagtacaccttcagcctgaccgtgtggaaggccggccgcaaggaggaggccaccaaccagacggtgggtgccgcccgcccctcggccacttgccttggacagcccagcctccctggtcatctactgttttccgtgttttagtgctggtggaggccgcacgctctcccctctctgtttctgatgcaaattctatgtaacacgacagcctgcttcagctttgcttccttccaaacctgccacagttccacgtacagtcttcaagccacatatgctctagtggcaaaagctacacagtcccctagcaataccaacagtgaggaagagccccttcccaccccagaggtagccactgtccccagcccatgtccctgttgctggatgtggtgggccggttctcaccctcacgctcccctctctggaccggccaggaggcttggtgaccctgagcccgtggtggctgctcctgctgctgtcaggcggggcctgctggtgccccagagtgggcgtctgttccccagtccctgctttcctcagctggcctgattgggggtcttcccagaggggtcgtctgaggggagggtgtgggagcaggttccatcccagctcagcctcctgacccaggccctggctaagggctgcaggagtctgtgagtcaggcctacgtggcagctgcggtcctcacacccacacatacgtctcttctcacacgcatccccccaggggccctcagtgagcattgcctgcctcctgctagggtccagctgggtccagtacaccagaacgcacactccagtgtcctctgccctgtgtatgcccttccgccgtccaagttggaaggtggcaaaccggatgagtatcctgggagggagtgagctcaccggcagtggccaggcccctgggaaacctggagtttgggagcagcatcctccatgggtcccccagtccttccagcaggccaaatagacctgtgttggaggtaaccccactcccacgccaggtgctgatccggagtggccgggtgcccattgtgtccttggagtgtgtgtcctgcaaggcacaggccgtgtacgaagtgagccgcagctcctacgtgtacttggagggccgctgcctcaattgcagcagcggctccaagcgaggggtgagtgttgagcggggtgtgggcgggctggggatgggtcccatggccgaggggacggggcctgcaggcagaagtggggctgacagggcagagggttgcgccccctcaccaccccttctgcctgcagcggtgggctgcacgtacgttcagcaacaagacgctggtgctggatgagaccaccacatccacgggcagtgcaggcatgcgactggtgctgcggcggggcgtgctgcgggacggcgagggatacaccttcacgctcacggtgctgggccgctctggcgaggaggagggctgcgcctccatccgcctgtcccccaaccgcccgccgctggggggctcttgccgcctcttcccactgggcgctgtgcacgccctcaccaccaaggtgcacttcgaatgcacgggtgagtgcaggcctgcgtggggggagcagcgggatcccccgactctgtgacgtcacggagccctcccgtgatgccgtggggaccgtccctcaggctggcatgacgcggaggatgctggcgccccgctggtgtacgccctgctgctgcggcgctgtcgccagggccactgcgaggagttctgtgtctacaagggcagcctctccagctacggagccgtgctgcccccgggtttcaggccacacttcgaggtgggcctggccgtggtggtgcaggaccagctgggagccgctgtggtcgccctcaacaggtgagccaggccgtgggagggcgcccccgagactgccacctgctcaccacccccctctgctcgtaggtctttggccatcaccctcccagagcccaacggcagcgcaacggggctcacagtctggctgcacgggctcaccgctagtgtgctcccagggctgctgcggcaggccgatccccagcacgtcatcgagtactcgttggccctggtcaccgtgctgaacgaggtgagtgcagcctgggaggggacgtcacatctgctgcatgcgtgcttgggaccaagacctgtacccctgcctggagctttgcagagggctcatcccgggccccagagataaatcccagtgaccctgaagcagcaccccgaccttccgctcccagcagccacacccaccgggccctctccggcgtctgctttccacaatgcagcccccgcccaggagggcccatgtgcttaccctgttttgcccatgaagaaacagctcagtgttgtgggtcagtgcccgcatcacacagcgtctagcacgtaactgcaccccgggagtcgtgggcatctgctggcctcctgccggcctcctgcgctgctgacagcttgctgtgccccctgcctgccccagtacgagcgggccctggacgtggcggcagagcccaagcacgagcggcagcaccgagcccagatacgcaagaacatcacggagactctggtgtccctgagggtccacactgtggatgacatccagcagatcgctgctgcgctggcccagtgcatggtaggatggccccacctgctcaccctgccccgcatgcctgccagggcactgggttcagccccccagggcagacgggcagcttggccgaggagctgagcctccagcctgggctccttcctgccatggcgttcctcggtctctgacctgcttcagtagcctcagccgttctgtcctgtgtgaacgcagggtgcctctcgggggacccagggtgtaaagaggggcccagatgtggggagggactaagaagatgctgctctgtgccctccactctcccctcccctcccctcccccttccctcccctagcccctcccctcctcccctcccctagcccttcccctcctcccctcccctagccctttcccttcttcccccccagcccttcccctcctcccctcccctttttctccactcccctctcctctctcccctcctcctccgctctcatgtgaagaggtgccttgtgtggtcggtgggctgcatcacgtggtccccaggtggaggccctgggtcatgcagagccacagaaaatgcttagtgaggaggctgtgggggtccagtcaagtgggctctccagctgcagggctgggggtgggagccaggtgaggacccgtgtagagaggagggcgtgtgcaaggagtggggccaggagcggggctggacactgctggctccacacaggggcccagcagggagctcgtatgccgctcgtgcctgaagcagacgctgcacaagctggaggccatgatgctcatcctgcaggcagagaccaccgcgggcaccgtgacgcccaccgccatcggagacagcatcctcaacatcacaggtgccgcggcccgtgccccatgccacccgcccgccccgtgcggccctttcctctgcctccctcctccccccaaccgcgtcgcctttgccccatcccatcttcgtccccctcccctccccccaattcccatcctcatccccctcccccaattcccattctcctccccctcccccttccctattaccatcccttttctccatctctctccccttttctccatttccccccccgtcctccccgtccttttgtccattcccctcatcttcctcatccccctcatcccccttcccctcccttatcccccttcccctccctttccccctgctcctcttcttctcccttctcttttctctacccttttccttcctttttcctccctctccccatcatccccctcatcttcgtcctcatccccatcaccttccccctcccccctccaccactctctctccagcttcccccttccttctgcctgcacctcgctctctgccccctcaggttccccctttctcccagcccccaccctccggctccccctttttgcctgcccccaccctccctctacctccctgtctctgcactgacctcacgcatgtctgcaggagacctcatccacctggccagctcggacgtgcgggcaccacagccctcagagctgggagccgagtcaccatctcggatggtggcgtcccaggcctacaacctgacctctgccctcatgcgcatcctcatgcgctcccgcgtgctcaacgaggagcccctgacgctggcgggcgaggagatcgtggcccagggcaagcgctcggacccgcggagcctgctgtgctatggcggcgccccagggcctggctgccacttctccatccccgaggctttcagcggggccctggccaacctcagtgacgtggtgcagctcatctttctggtggactccaatccctttccctttggctatatcagcaactacaccgtctccaccaaggtggcctcgatggcattccagacacaggccggcgcccagatccccatcgagcggctggcctcagagcgcgccatcaccgtgaaggtgcccaacaactcggactgggctgcccggggccaccgcagctccgccaactccgccaactccgttgtggtccagccccaggcctccgtcggtgctgtggtcaccctggacagcagcaaccctgcggccgggctgcatctgcagctcaactatacgctgctggacggtgcgtgcagcgggtggggcacacgcggccccctggccttgttcttggggggaaggcgtttctcgtagggcttccatgggtgtctctggtgaaatttgctttctgtttcatgggctgctgggggcctggccagagaggagctgggggccacggagaagcaggtgccagctctggtgcagaggctcctatggcctttcaggcccgtggcagagggtgggctcaggagggccatcgtgggtgtcccccgggtggttgagcttcccggcaggcgtgtgacctgcgcgttctgccccaggccactacctgtctgaggaacctgagccctacctggcagtctacctacactcggagccccggcccaatgagcacaactgctcggctagcaggaggatccgcccagagtcactccagggtgctgaccaccggccctacaccttcttcatttccccggggtgagctctgcgggccagcctggcagggcagggcagggcatcatgggtcagcattgcctgggttactggccccatggggacggcaggcagcgaggggactggaccgggtatgggctctgagactgcgacatccaacctggcggagcctgggctcacgtccgctaccccttccctgcccaggagcagagacccagcggggagttaccatctgaacctctccagccacttccgctggtcggcgctgcaggtgtccgtgggcctgtacacgtccctgtgccagtacttcagcgaggaggacatggtgtggcggacagaggggctgctgcccctggaggagacctcgccccgccaggccgtctgcctcacccgccacctcaccgccttcggcgccagcctcttcgtgcccccaagccatgtccgctttgtgtttcctgtgagtgaccctgtgctcctgggagcctctgcagagtcgaggagggcctgggtgggctcggctctatcctgagaaggcacagcttgcacgtgacctcctgggcccggcggctgtgtcctcacaggagccgacagcggatgtaaactacatcgtcatgctgacatgtgctgtgtgcctggtgacctacatggtcatggccgccatcctgcacaagctggaccagttggatgccagccggggccgcgccatccctttctgtgggcagcggggccgcttcaagtacgagatcctcgtcaagacaggctggggccggggctcaggtgaggggcgcagcggggtggcagggcctcccctgctctcactggctgtgctggttgcaccctctgggagtgagtctcgtcgcaggcgtcagaacaaggcagtttttgcagtgctgtgtgaagggctcgtgtgttcatcctgggaatgacctcgtgagcactcactgtccctgaggactaggacagctcctagctggaagtaggtgccagtcagtcagggtgggcagcccacgttctgcacagtagcgtggccccacaagtgacgtgagcatcgctaccactgtgggagactgtgcatccacccgcgatcctgactgcatagctcgtctctcagacggaggcgccagcaccctccccgtggctgtttcttcagtacctccattttcctttcattggaattgcccttctggcattccctttttgttttcgtttttctttttttagagacggagtctcactctgttgcccaggctggagtgcaatggcatgatcttggctcacagcaacttccagctcccgggtttaagccattccccttaagcgattctcctgagtagctgggagtacaggtgcacaccaccacacccagttaatttttcaccatgtcagccaggcgaactcctgacctcaggtgatccgcctgcctcggcctgccagagtgctgggatgacaggtgtgagccaccacacctggctgtgttcccattttttatctctgtgctgctttcctcttcattgcccagttctttcttttgattacctacttttaaaaactgtcggccgggcgcggtggctcacacctgtaatccgagcactttgggaggccaggcaggcaaatcacggggtcaggagatcgagaccatcctggctaacggtgaaaccctgtctctaataaaaagtacaaaaaaattagcccggcgtagtggcaggcgcctgtagtcccagctccttgggagactgaggcaggagaatggcgtgaacccgggaggcggagcttgcagtgagctgagattgcgccactgcactccagcctgggtgacacagcaagactccatctcaaaaaaaaaagaaaaaaaatactgtcacctgggtctgtcactgggagaggaggtgacacagcttcacgctttgcagtctgtgcatgaactgagggacgggtgtgtggtgcgggtcaccggttgtggcatgactgaggcgtggacaggtgtgcagtgcgggtcactggttgtggtgtggactgaggcgtgtgcagccatgtttgcatgtcacaagttacagttctttccatgtaacttaatcatgtccttgaggtcctgctgttaattggacaaattgcagtaaccgcagctccttgtgtatggcagagccgtgcaaagccgggactgcctgtgtggctccttgagtgcgcacaggccaaagctgagatgacttgcctgggatgccacacgtgttgggcagcagaccgagcctcccacccctccctcttgcctcccaggtaccacggcccacgtgggcatcatgctgtatggggtggacagccggagcggccaccggcacctggacggcgacagagccttccaccgcaacagcctggacatcttccggatcgccaccccgcacagcctgggtagcgtgtggaagatccgagtgtggcacgacaacaaaggtttgtgcggaccctgccaagctctgcccctctgcccccgcattggggcgccctgcgagcctgacctccctcctgcgcctctgcagggctcagccctgcctggttcctgcagcacgtcatcgtcagggacctgcagacggcacgcagcgccttcttcctggtcaatgactggctttcggtggagacggaggccaacgggggcctggtggagaaggaggtgctggccgcgagtaaggcctcgttccatgttcccactccgtgggaggttgggcagggtggtcctgccccgtggcctcctgcagtgcggccctccctgccttctaggcgacgcagcccttttgcgcttccggcgcctgctggtggctgagctgcagcgtggcttctttgacaagcacatctggctctccatatgggaccggccgcctcgtagccgtttcactcgcatccagagggccacctgctgcgttctcctcatctgcctcttcctgggcgccaacgccgtgtggtacggggctgttggcgactctgcctacaggtgggtgccgtaggggtcggggcagcctcttcctgcccagcccttcctgcccctcagcctcacctgtgtggcctcctctcctccacacagcacggggcatgtgtccaggctgagcccgctgagcgtcgacacagtcgctgttggcctggtgtccagcgtggttgtctatcccgtctacctggccatcctttttctcttccggatgtcccggagcaaggtgggctggggctggggacccgggagtactgggaatggagcctgggcctcggcaccatgcctagggccgccactttccagtgctgcagccagagggaaaggcgtccaccaaaggctgctcgggaagggtcaacacacttgagcagccttagctagactgaccagggagaaagagagaagactcagaagccagaatggtgaaagaacgagggcactttgctaagcagacgccacggacgactgcacagcagcacgccagataactcagaagaagcaagcacgcggctgtgcacgcttccgaaatgcactccagaagaaaatctcagtacatctataggaagtgaagaggctgagttagtcccttagaaacgtcccagtggccgggccgggtgtggtggctcacgcctgtaatcccaacacttcaggtggccgaggtgggcggatctgagtccaggagtttgagaccagcctgggcaacatagcaagaccccatctatataaaacattaaaaagggccaggcgcggtggctcacgcctgtaatcccagcactttgggaggccgaggcgggcagatcacttgaggtcaggagttcgagaccagcctggccaacacaatgaaaccccgactctactacaaatacaaaaacttagctgggcatggtggcgggcgcctgtagtcccagctactcgagaggctgaggcaggagaatggcatgaacccaggaggcggagcttgcagtgagccgagattgcgccactgcactccatcctgggcaacggagcaagactccatctccaaaaaaaaaaaaaaaaaatcccacaaagaaaagctcaggctcagagccttcacgatagaatttttctaagcagttaaggaagaattaacaccaatccttcacagactctttccaagaatacagcaggtgggaacgcttcccattcatacggaaacgggaggccgcaccccttaggaatgcacacgtggggtcctcaagaggttacatgcaaactaaccccagcagcacacagagaaggcgcataagccgcgaccaggaggggttgctcccgagtccgtggcaggaaccagaggccacatgtggctgctcgtatttaagttaattaaaatggaacgatggccgggtgtggtggctcacacctgtaatcccagcactttgggaggcggaggcgggcagatcacttgaggtcaggagttccaagaccagcctggccaacacagtgaaaccccgtctctactaaaaatacaaaaaattagctgggcatggtggcaggcacctgtaatcccagctactcaggaggctgagccaggacaatcgcctgaacgcgggaggtggaggttgcagtgagctgagattgcgccattgcactccagcctgggtgacagcgagactccatctaaaaaagaaaatatgaaatttaaaactctgttccttagctgcaccagtctgctgtcaagtgttcagtggcacacgtcgcgaggggctgccatcacggacggtgcagatgtcccatatatccagcattctaggacattctgtcagatggcaccgggctctgtcctgtctgctgaggaggtggcttctcatccctgtcctgagcaggtctgagctgccgcccgctgaccactgccctcgtcctgcaggtggctgggagcccgagccccacacctgccgggcagcaggtgctggacatcgacagctgcctggactcgtccgtgctggacagctccttcctcacgttctcaggcctccacgctgaggtgaggactctactgggggtcctgggctgggctgggggtcctgccgccttggcgcagcttggactcaagacactgtgcacctctcagcaggcctttgttggacagatgaagagtgacttgtttctggatgattctaagaggtgggttccctagagaaacctcgagccctggtgcaggtcactgtgtctggggtgccgggggtgtgcgggctgcgtgtccttgctgggtgtctgtggctccatgtggtcacaccacccgggagcaggtttgctcggaagcccagggtgtccgtgcgtgactggacgggggtgggctgtgtgtgtgacacatcccctggtaccttgctgacccgcgccacctgcagtctggtgtgctggccctccggcgagggaacgctcagttggccggacctgctcagtgacccgtccattgtgggtagcaatctgcggcagctggcacggggccaggcgggccatgggctgggcccagaggaggacggcttctccctggccagcccctactcgcctgccaaatccttctcagcatcaggtgagctggggtgagaggagggggctctgaagctcacccttgcagctgggcccaccctatgcctcctgtacctctagatgaagacctgatccagcaggtccttgccgagggggtcagcagcccagcccctacccaagacacccacatggaaacggacctgctcagcagcctgtgagtgtccggctctcgggggaggggggattgccagaggaggggccgggactcaggccaggcagccgtggttcccgcctggggtagggtggggtggggtgccagggcagggctgtggctgcaccacttcacttctctgaacctctgttgtctgtggaaagagcctcatgggatccccagggccccagaaccttccctctagggagggagcaggctcatggggctttgtaggagcagaaaggctcctgtgtgaggctggccggggccacgtttttatcttggtctcagagcagtgagaaattatgggcgggtttttaaataccccatttttggccgggcgcggtggctcacacgtgtaatcccagcactttgggaggccgaggtgggcagatgacctgaggtcagcagttcgagaccagcctggccaacatggcgaaaccccgtctctactaaaaatacaaaaaattagccgggcatgctggcaggcgcctgtagtcccagttactcgggagactgaggtaggagaatcgattgaacctggtaggtgaaggttgtagtgagccgagatcgcgccactgcactccagcctgggcaacaagagcgaaactccgtctcaaaaacaaaaaaattcctcaatttcttggttgttttgtaacttatcaacaaatggtcatatagaggttaccttgtatgtagtcacgcacatagtcacgcacatggcagccggcggcggagcgcacccacggcgtgttcccacgcgtgtgaccccgggctctgccatgccctcctatgctcaggtgtgctgaggtccacacggccctgccgttgcactgcagctgcctgcaggattcagtgcagtggcatgcagtgcaggtgcggtgccccggagccacaggccacaccacagggcctgcatgcacaggggctgcggtgtctgggtttgggtaactacgccctgtgacatttgcacagcaacagaattacctaatgacgcatttctcagaacacatccctggcactaagtggtgcgtgactgctgcttttgcatccacatctagtttgatttgtgtgttattcctttgagtgcttctcattgttaagcaaccaagaactaaagaggtatgaactgcccctggactcaaacaaaaaggaaaacttcctgatttacaaaaggcagataaccatcacatgagggcatctttatgaataaattgctggttggttttaaaaatacagagtatggggaaatccaggggtagtcactacatgctgaccagccccaggtatctccggcccaaagctctgtgaaatccagattcagtgcttccgcggggatttctgacggcagctcagactccgcatccacacagagcgcgtggccctcaccctcccggcttcctcaacccttggccgtcccttgctcggacagtgcttcgggctgaccaggtcggaggcttgggtttgtcctggacccctctgcgtccttcctcactgcagcctccagcgcgtcccgtggctcctttcccaacgcagagcacggccttccctgcgcctgagcctgcaccctccgtcctggcggcgcctctgccctggcattccctgccactccatgcctccctattggccattctccgtctctgccagcgagagcctgctccctgagtcagaccctgagtcatttgtgttgctataaaggaatagttgaggctgggttattttttatttttatttatttttttgagatggagtctctgttgcccagactggagtgcagtcgcatgatctcggctcactgcaaagtctgcctcccacgttcaagcagttatctgcctcagcctcccaagtagctaagattacaggcgcccgccgccacagccggctaattttttgtgtgtgtgttttagtagagaggaggtttcaccatcttagccaggctggtcttgaactcctgacctcgtgatccacccatctcagcctcccaaaatgctgagattacaggcgtgagccaccacgcctgaccaagttgaggctaggtcattttttaattttttgtaaagacagggtctcactgtctccaactcctgagctcaagtgatcctcctgcctcagcctcctgaagtgctgggattacaggcttgagacactgcgcccagccaagagtgtcttttatcctccgagagacagcaaaacaggaagcattcagtgcagtgtgaccctgggtcaggccgttctttcggtgatgggctgacgagggcgcaggtacgggagagcgtcctgagagcccgggactcggcgtctcgcagttggtctcgtcctccccctcaacgtgtcttcgctgcctctgtacctcttctctagcagctctgggaccgggcatatcagcatggtggcccgatgcagtggcacagcctcggtggtcactggctcctggagacacaagcagatctctggcctcagggagccctacacactgttgggatttgaaaggcattcatatgtttccttgtccagaagttaattttaggccataaacctgcatgggacagacacactggcgtctctagattgtagagatgcttgttggatggttgagacccaatcatagtttgcagggttgaaggggggctcattgcaccctgagagactgtgcactgctgtaagggcagctggtcaggctgtgggcgatgggtttatcagcagcaagcgggcgggagagggacgcaggcggacgcctgacttcggtgcctggagtggctcttggttccctggctcccagcaccactcccactctcgtttggggtagggtcttccggctttttgtcggggggaccctgtgacccaagaggctcaagaaactgcccgcccaggttaacatgggcttggctgcaactgcctcctggaggccgggatgaattcacagcctaccatgtccctcaggtccagcactcctggggagaagacagagacgctggcgctgcagaggctgggggagctggggccacccagcccaggcctgaactgggaacagccccaggcagcgaggctgtccaggacaggtgtgcttgcgtagccccgggatgcccctagcccctccctgtgagctgcctctcacaggtctgtctctgcttccccaggactggtggagggtctgcggaagcgcctgctgccggcctggtgtgcctccctggcccacgggctcagcctgctcctggtggctgtggctgtggctgtctcagggtgggtgggtgcgagcttccccccgggcgtgagtgttgcgtggctcctgtccagcagcgccagcttcctggcctcattcctcggctgggagccactgaaggtgagggggctgccaggggtaggctacaggcctccatcacgggggacccctctgaagccaccccctccccaggtcttgctggaagccctgtacttctcactggtggccaagcggctgcacccggatgaagatgacaccctggtagagagcccggctgtgacgcctgtgagcgcacgtgtgccccgcgtacggccaccccacggctttgcactcttcctggccaaggaagaagcccgcaaggtcaagaggctacatggcatgctgcgggtgagcctgggtgcggcctgtgcccctgccacctccgtctcttgtctcccacctcccacccatgcacgcaggacactcctgtccccctttcctcacctcagaaggcccttaggggttcaatgctctgcagcctttgcccggtctccctcctaccccacgccccccacttgctgccccagtccctgccagggcccagctccaatgcccactcctgcctggccctgaaggcccctaagcaccactgcagtggcctgtgtgtctgcccccaggtggggttccgggcagggtgtgtgctgccattaccctggccaggtagagtcttggggcgccccctgccagctcaccttcctgcagccacacctgccgcagccatggctccagccgttgccaaagccctgctgtcactgtgggctggggccaggctgaccacagggcccccccgtccaccagagcctcctggtgtacatgctttttctgctggtgaccctgctggccagctatggggatgcctcatgccatgggcacgcctaccgtctgcaaagcgccatcaagcaggagctgcacagccgggccttcctggccatcacgcggtacgggcatccggtgcactggtctgtcttctgggctttagttttgcctttagtccagccagaccctaggggacatgtggacatgtgtagatacctttgtggctgctagaactggaggtaggtgctgctggcatcagtaggcagaggggagggacacaggtccgtgtcttgcagtgcacaggacgggcccatgacagacaactgtctgccccagaacatccccaggataaggctgagaagcccaggtctagccgtggccagcagggcagtgggagccatgttccctgggtctctggtggccgctcactcgaggcgggcatggggcagtaggggctggagcgtgtgactgatgctgtggcaggtctgaggagctctggccatggatggcccacgtgctgctgccctacgtccacgggaaccagtccagcccagagctggggcccccacggctgcggcaggtgcggctgcaggaaggtgagctggcagggcgtgccccaagacttaaatcgttcctcttgttgagagagcagcctttagcggagctctggcatcagccctgctccctagctgtgtgacctttgccctcttaacaccgccgtttccttctctgtatatgagagatggtaacgttgtctaattgatggctgctgggagggttccctggggtggcgccgaaccagagctcaggcgagctggccagcaggaaacactcctgttgggttttgatgaggccctggccccggcctggggctctgtgtgtttcagcactctacccagaccctcccggccccagggtccacacgtgctcggccgcaggaggcttcagcaccagcgattacgacgttggctgggagagtcctcacaatggctcggggacgtgggcctattcagcgccggatctgctggggtgagcagagcgagggccccgggcgtctacgccaaggacaagggagtagttctccaggagtgccgcggcctcctgaccagcctggctccggggtgccggaagggctggggtgcggcacccacgccacccctctccggcagggcatggtcctggggctcctgtgccgtgtatgacagcgggggctacgtgcaggagctgggcctgagcctggaggagagccgcgaccggctgcgcttcctgcagctgcacaactggctggacaacaggtgggagctccctcccctgccctctccggggtggccgcagtcaccagccaggagcccaccctcactcctccggcccccgctggcctaggcggcttccacagcccctcagccacgcctgcactgcgcggtccccgcagctcccgccctgccacccgctcctactgacccgcaccctctgcgcaggagccgcgctgtgttcctggagctcacgcgctacagcccggccgtggggctgcacgccgccgtcacgctgcgcctcgagttcccggcggccggccgcgccctggccgccctcagcgtccgcccctttgcgctgcgccgcctcagcgcgggcctctcgctgcctctgctcacctcggtacgcccgtccccggccagaccccgcgcctcccaccggcagcgtcccgccccctcgcggggccccgccccggcagcgtctcacccctcgcagcgccccgccccctcgcagcgtcccgccccctcgcagggccccgccccggcagcgtcccgccccctcgtagggccccgccccggcagcgtcccgccccctcgcagggccccgccccggcagcgtccctcccgccctcctgaccgcgccccccacaggtgtgcctgctgctgttcgccgtgcacttcgccgtggccgaggcccgtacttggcacagggaagggcgctggcgcgtgctgcggctcggagcctgggcgcggtggctgctggtggcgctgacggcggccacggcactggtacgcctcgcccagctgggtgccgctgaccgccagtggacccgtttcgtgcgcggccgcccgcgccgcttcactagcttcgaccaggtggcgcagctgagctccgcagcccgtggcctggcggcctcgctgctcttcctgcttttggtcaaggtgagggctgggccggtgggcgcggggctgggcgcacaccccagggctgcaagcagacagatttctcgtccgcaggctgcccagcagctacgcttcgtgcgccagtggtccgtctttggcaagacattatgccgagctctgccagagctcctgggggtcaccttgggcctggtggtgctcggggtagcctacgcccagctggccatcctggtaggtgactgcgcggccggggagggcgtcttagctcagctcagctcagctgtacgccctcactggtgtcgccttccccgcagctcgtgtcttcctgtgtggactccctctggagcgtggcccaggccctgttggtgctgtgccctgggactgggctctctaccctgtgtcctgccgagtcctggcacctgtcacccctgctgtgtgtggggctctgggcactgcggctgtggggcgccctacggctgggggctgttattctccgctggcgctaccacgccttgcgtggagagctgtaccggccggcctgggagccccaggactacgagatggtggagttgttcctgcgcaggctgcgcctctggatgggcctcagcaaggtcaaggaggtgggtacggcccagtgggggggagagggacacgccctgggctctgcccagggtgcagccggactgactgagcccctgtgccgcccccagttccgccacaaagtccgctttgaagggatggagccgctgccctctcgctcctccaggggctccaaggtatccccggatgtgcccccacccagcgctggctccgatgcctcgcacccctccacctcctccagccagctggatgggctgagcgtgagcctgggccggctggggacaaggtgtgagcctgagccctcccgcctccaagccgtgttcgaggccctgctcacccagtttgaccgactcaaccaggccacagaggacgtctaccagctggagcagcagctgcacagcctgcaaggccgcaggagcagccgggcgcccgccggatcttcccgtggcccatccccgggcctgcggccagcactgcccagccgccttgcccgggccagtcggggtgtggacctggccactggccccagcaggacaccccttcgggccaagaacaaggtccaccccagcagcacttagtcctccttcctggcgggggtgggccgtggagtcggagtggacaccgctcagtattactttctgccgctgtcaaggccgagggccaggcagaatggctgcacgtaggttccccagagagcaggcaggggcatctgtctgtctgtgggcttcagcactttaaagaggctgtgtggccaaccaggacccagggtcccctccccagctcccttgggaaggacacagcagtattggacggtttctagcctctgagatgctaatttatttccccgagtcctcaggtacagcgggctgtgcccggccccaccccctgggcagatgtcccccactgctaaggctgctggcttcagggagggttagcctgcaccgccgccaccctgcccctaagttattacctctccagttcctaccgtactccctgcaccgtctcactgtgtgtctcgtgtcagtaatttatatggtgttaaaatgtgtatatttttgtatgtcactattttcactagggctgaggggcctgcgcccagagctggcctcccccaacacctgctgcgcttggtaggtgtggtggcgttatggcagcccggctgctgcttggatgcgagcttggccttgggccggtgctgggggcacagctgtctgccaggcactctcatcaccccagaggccttgtcatcctcccttgccccaggccaggtagcaagagagcagcgcccaggcctgctggcatcaggtctgggcaagtagcaggactaggcatgtcagaggaccccagggtggttagaggaaaagactcctcctgggggctggctcccagggtggaggaaggtgactgtgtgtgtgtgtgtgtgcgcgcgcgcacgcgcgagtgtgctgtatggcccaggcagcctcaaggccctcggagctggctgtgcctgcttctgtgtaccacttctgtgggcatggccgcttctagagcctcgacacccccccaacccccgcaccaagcagacaaagtcaataaaagagctgtctgactgcaa

SEQ ID NO: 100 - DNA, 6911 bp, Homo sapiens
tcgaccgcccagccaggtgcaaaatgccgtgtcattgggagactccgcagccggagcattagattacagctcgacggagctcgggaagggcggcgggggtggaagatgagcagaagcccctgttctcggaacgccggctgacaagcggggtgagcgcaggcggggcggggacccagcctagcccactggagcagccgggggtggcccgttcccctttaagagcaactgctctaagccaggagccagagattcgagccggcctcgcccagccagccctctccagcgaggggacccacaagcggcgcctcggccctcccgacctttccgagccctctttgcgccctgggcgcacggggccctacacgcgccaagcatgctgagggtcttcatcctctatgccgagaacgtccacacacccgacaccgacatcagcgatgcctactgctccgcggtgtttgcaggggtgaagaagagaaccaaagtcatcaagaacagcgtgaaccctgtatggaatgagggatttgaatgggacctcaagggcatccccctggaccagggctctgagcttcatgtggtggtcaaagaccatgagacgatggggaggaacaggttcctgggggaagccaaggtcccactccgagaggtcctcgccacccctagtctgtccgccagcttcaatgcccccctgctggacaccaagaagcagcccacaggggcctcgctggtcctgcaggtgtcctacacaccgctgcctggagctgtgcccctgttcccgccccctactcctctggagccctccccgactctgcctgacctggatgtagtggcagacacaggaggagaggaagacacagaggaccagggactcactggagatgaggcggagccattcctggatcaaagcggaggcccgggggctcccaccaccccaaggaaactaccttcacgtcctccgccccactaccccgggatcaaaagaaagcgaagtgcgcctacatctagaaagctgctgtcagacaaaccgcaggatttccagatcagggtccaggtgatcgaggggcgccagctgccgggggtgaacatcaagcctgtggtcaaggttaccgctgcagggcagaccaagcggacgcggatccacaagggaaacagcccactcttcaatgagactcttttcttcaacttgtttgactctcctggggagctgtttgatgagcccatctttatcacggtggtagactctcgttctctcaggacagatgctctcctcggggagttccggatggacgtgggcaccatttacagagagccccggcacgcctatctcaggaagtggctgctgctctcagaccctgatgacttctctgctggggccagaggctacctgaaaacaagcctttgtgtgctggggcctggggacgaagcgcctctggagagaaaagacccctctgaagacaaggaggacattgaaagcaacctgctccggcccacaggcgtagccctgcgaggagcccacttctgcctgaaggtcttccgggccgaggacttgccgcagatggacgatgccgtgatggacaacgtgaaacagatctttggcttcgagagtaacaagaagaacttggtggacccctttgtggaggtcagctttgcggggaaaatgctgtgcagcaagatcttggagaagacggccaaccctcagtggaaccagaacatcacactgcctgccatgtttccctccatgtgcgaaaaaatgaggattcgtatcatagactgggaccgcctgactcacaatgacatcgtggctaccacctacctgagtatgtcgaaaatctctgcccctggaggagaaatagaagaggagcctgcaggtgctgtcaagccttcgaaagcctcagacttggatgactacctgggcttcctccccacttttgggccctgctacatcaacctctatggcagtcccagagagttcacaggcttcccagacccctacacagagctcaacacaggcaagggggaaggtgtggcttatcgtggccggcttctgctctccctggagaccaagctggtggagcacagtgaacagaaggtggaggaccttcctgcggatgacatcctccgggtggagaagtaccttaggaggcgcaagtactccctgtttgcggccttctactcagccaccatgctgcaggatgtggatgatgccatccagtttgaggtcagcatcgggaactacgggaacaagttcgacatgacctgcctgccgctggcctccaccactcagtacagccgtgcagtctttgacgggtgccactactactacctaccctggggtaacgtgaaacctgtggtggtgctgtcatcctactgggaggacatcagccatagaatcgagactcagaaccagctgcttgggattgctgaccggctggaagctggcctggagcaggtccacctggccctgaaggcgcagtgctccacggaggacgtggactcgctggtggctcagctgacggatgagctcatcgcaggctgcagccagcctctgggtgacatccatgagacaccctctgccacccacctggaccagtacctgtaccagctgcgcacccatcacctgagccaaatcactgaggctgccctggccctgaagctcggccacagtgagctccctgcagctctggagcaggcggaggactggctcctgcgtctgcgtgccctggcagaggagccccagaacagcctgccggacatcgtcatctggatgctgcagggagacaagcgtgtggcataccagcgggtgcccgcccaccaagtcctcttctcccggcggggtgccaactactgtggcaagaattgtgggaagctacagacaatctttctgaaatatccgatggagaaggtgcctggcgcccggatgccagtgcagatacgggtcaagctgtggtttgggctctctgtggatgagaaggagttcaaccagtttgctgaggggaagctgtctgtctttgctgaaacctatgagaacgagactaagttggcccttgttgggaactggggcacaacgggcctcacctaccccaagttttctgacgtcacgggcaagatcaagctacccaaggacagcttccgcccctcggccggctggacctgggctggagattggttcgtgtgtccggagaagactctgctccatgacatggacgccggtcacctgagcttcgtggaagaggtgtttgagaaccagacccggcttcccggaggccagtggatctacatgagtgacaactacaccgatgtgaacggggagaaggtgcttcccaaggatgacattgagtgcccactgggctggaagtgggaagatgaggaatggtccacagacctcaaccgggctgtcgatgagcaaggctgggagtatagcatcaccatccccccggagcggaagccgaagcactgggtccctgctgagaagatgtactacacacaccgacggcggcgctgggtgcgcctgcgcaggagggatctcagccaaatggaagcactgaaaaggcacaggcaggcggaggcggagggcgagggctgggagtacgcctctctttttggctggaagttccacctcgagtaccgcaagacagatgccttccgccgccgccgctggcgccgtcgcatggagccactggagaagacggggcctgcagctgtgtttgcccttgagggggccctgggcggcgtgatggatgacaagagtgaagattccatgtccgtctccaccttgagcttcggtgtgaacagacccacgatttcctgcatattcgactatgggaaccgctaccatctacgctgctacatgtaccaggcccgggacctggctgcgatggacaaggactctttttctgatccctatgccatcgtctccttcctgcaccagagccagaagacggtggtggtgaagaacacccttaaccccacctgggaccagacgctcatcttctacgagatcgagatctttggcgagccggccacagttgctgagcaaccgcccagcattgtggtggagctgtacgaccatgacacttatggtgcagacgagtttatgggtcgctgcatctgtcaaccgagtctggaacggatgccacggctggcctggttcccactgacgaggggcagccagccgtcgggggagctgctggcctcttttgagctcatccagagagagaagccggccatccaccatattcctggttttgaggtgcaggagacatcaaggatcctggatgagtctgaggacacagacctgccctacccaccaccccagagggaggccaacatctacatggttcctcagaacatcaagccagcgctccagcgtaccgccatcgagatcctggcatggggcctgcggaacatgaagagttaccagctggccaacatctcctcccccagcctcgtggtagagtgtgggggccagacggtgcagtcctgtgtcatcaggaacctccggaagaaccccaactttgacatctgcaccctcttcatggaagtgatgctgcccagggaggagctctactgcccccccatcaccgtcaaggtcatcgataaccgccagtttggccgccggcctgtggtgggccagtgtaccatccgctccctggagagcttcctgtgtgacccctactcggcggagagtccatccccacagggtggcccagacgatgtgagcctactcagtcctggggaagacgtgctcatcgacattgatgacaaggagcccctcatccccatccaggaggaagagttcatcgattggtggagcaaattctttgcctccataggggagagggaaaagtgcggctcctacctggagaaggattttgacaccctgaaggtctatgacacacagctggagaatgtggaggcctttgagggcctgtctgacttttgtaacaccttcaagctgtaccggggcaagacgcaggaggagacagaagatccatctgtgattggtgaatttaagggcctcttcaaaatttatcccctcccagaagacccagccatccccatgcccccaagacagttccaccagctggccgcccagggaccccaggagtgcttggtccgtatctacattgtccgagcatttggcctgcagcccaaggaccccaatggaaagtgtgatccttacatcaagatctccatagggaagaaatcagtgagtgaccaggataactacatcccctgcacgctggagcccgtatttggaaagatgttcgagctgacctgcactctgcctctggagaaggacctaaagatcactctctatgactatgacctcctctccaaggacgaaaagatcggtgagacggtcgtcgacctggagaacaggctgctgtccaagtttggggctcgctgtggactcccacagacctactgtgtctctggaccgaaccagtggcgggaccagctccgcccctcccagctcctccacctcttctgccagcagcatagagtcaaggcacctgtgtaccggacagaccgtgtaatgtttcaggataaagaatattccattgaagagatagaggctggcaggatcccaaacccacacctgggcccagtggaggagcgtctggctctgcatgtgcttcagcagcagggcctggtcccggagcacgtggagtcacggcccctctacagccccctgcagccagacatcgagcaggggaagctgcagatgtgggtcgacctatttccgaaggccctggggcggcctggacctcccttcaacatcaccccacggagagccagaaggtttttcctgcgttgtattatctggaataccagagatgtgatcctggatgacctgagcctcacgggggagaagatgagcgacatttatgtgaaaggttggatgattggctttgaagaacacaagcaaaagacagacgtgcattatcgttccctgggaggtgaaggcaacttcaactggaggttcattttccccttcgactacctgccagctgagcaagtctgtaccattgccaagaaggatgccttctggaggctggacaagactgagagcaaaatcccagcacgagtggtgttccagatctgggacaatgacaagttctcctttgatgattttctgggctccctgcagctcgatctcaaccgcatgcccaagccagccaagacagccaagaagtgctccttggaccagctggatgatgctttccacccagaatggtttgtgtccctttttgagcagaaaacagtgaagggctggtggccctgtgtagcagaagagggtgagaagaaaatactggcgggcaagctggaaatgaccttggagattgtagcagagagtgagcatgaggagcggcctgctggccagggccgggatgagcccaacatgaaccctaagcttgaggacccaaggcgccccgacacctccttcctgtggtttacctccccatacaagaccatgaagttcatcctgtggcggcgtttccggtgggccatcatcctcttcatcatcctcttcatcctgctgctgttcctggccatcttcatctacgccttcccgaactatgctgccatgaagctggtgaagcccttcagctgaggactctcctgccctgtagaaggggccgtggggtcccctccagcatgggactggcctgcctcctccgcccagctcggcgagctcctccagacctcctaggcctgattgtcctgccagggtgggcagacagacagatggaccggcccacactcccagagttgctaacatggagctctgagatcaccccacttccatcatttccttctcccccaacccaacgcttttttggatcagctcagacatatttcagtataaaacagttggaaccacaaaaaaaaaaaaaaaaaaaaaaaaa

SEQ ID NO: 101 - DNA, 53001 bp, Homo sapiens
aacaagtaagtctgtaaagactgaagggaattaacatttatgacagattccttaatgtgcaatagctcatttagacctcacaacagtatctccctttaccctgggggatgctaaatctcaaagcagtcaaatagtgttcccagacccacatctagtgagtggcagccagaatttcaagtcgggtctgtaggcctccaaagccagaggcttctttctactgcccatccaacctttctcaaaaggcaaataaggtcatgcatttttatttactgaattttaagtaaagcagtgtcttttgaagcgggcccagtgccacttgcagcagaatcacctgggatgtctattacaaatgcagattcctgaaccttctccacatgaactgaagcagacttgctagggccgagggagacccaggaatctgtattattacaagctctccaggtaattggagagactttacaatttgggaaccatgattttaaactaataatttagtgttccattctagtgtagtttatttatggatctgtggctcatggaaatttcctcctagtatcaggaagatacaacttaaaaatagtctgtttttccttcctattgtatccactgaattccacggaaaatgttaaggaactggaggtgtgattaacactgattaatctaggctccgtacgtcaaaggcacagactgacatgaacatacatgctgattagaatcatacagagctggaaggggatgggcaaagaaatggcattagctaaatatttactatgttccagacactgtaccagacacattacgtcatttaaggggcccaagacaagtgattcaatcccttttatttataaacggggtaggtactattattatttacattttagagatgaagaagctaatggccagagaaaaacagtcactttctgagatcattcattcattcatacaataaaaatctcattagctcttatcttatgaaagacattgcaaatagagcagcaaaaaggcagtctagggacctcaggtggcacaaagtccaccaaatctccattgaagaaactggaactgagagggcaaattgggactggagcctgccagaagccatctctctggaatccctcagcctgagcaagaggggagtttgctgctgaggctgctggagctgcggtgtagagcaagttgcaggcctctgagcctgttggaggttcagaaaggttagctgacttgcttaagtaagtgtcctagacaggagggagaaagcgcgcgggtctcagatcccagctccaatatccacgccttttcccttttcatctcccggaaggaagccttcacaggtggggaaaatgctcacccagtgactctaaagtagtgcacaaattggcattaatcagaaccattctgattcctgctatcaaggtttatttaattctaagctcaaatgacacagaaaataaaatttcctccttaaaaggttctgcggaaaaatattctctgttctacgtaacagcctccttggctgtgtttgtgtctgaagaaaggactagtctgacaggaagaattacaaatctggagctcattttggcgtcgcagagggaaggtgggtggagcgtctcgcagtaaattaggaattcagaatgaaaacgtagagtttatttgggtttttagtgacacctcaggattattatacagcagtgtcagacacagctcaaagtaatgatgactgctccccctccgccccgcgggagctgggtgctaagaagggggaacccctcctttgaggggttggggtggggatcctccctttccaacctggatcgggaaggggtttgagaggagtgcggcttggatccccatcctggatctgtgctggagggaggcgggaggctatttgggggtgtgtttgggctcaggatctgggtctgacgctgggatctgaggactttctgggtttggaactgggtgggggagctgggtttggggtgaccgctgggagcaggaggaaataggagagtgagtcgcatgtgaagggcactgaggagggatcttcgggggaatgctgaagttgatgcgtggacttggagaggggaagttgaagtggatgcaggggcctggcgctgcagcggatctgggtggcatgtgctgggattgccaatgcggagctgtgaatggggtcagggtggggctgaggcagtaccagatcttccgcgcctagaggaggttagaagaaaagagcgtcgaacggccacagcctttttccgaaagagactcacacagacacacccatcgctctacccggccctccggggctagcggctgagcggtgctggggctggcagaccccgcccccacgcggcctctcggagccgggagccgatcgggccggggctggggtctggcggcccagcccccggggagcgtggggcgtggccagaaaccggcgctcgcggctgcggattggctgcctggcgggcccgcaggcggggctcccggctgggtcccgcttggcagctcgcggcggcggggaggcggggccggcgggagcccggcagccaatggacgcgcgtcctccgagcagttacaaagggccggagcgaggccgccgcggcggctagggaggtggggcgaggcgaggtttgctggggtgaggcagcggcgcggccgggccgggccgggccacaggcggtggcggcgggaccatggaggcggcggtcgctgctccgcgtccccggctgctcctcctcgtgctggcggcggcggcggcggcggcggcggcgctgctcccgggggcgacgggtgagcggcggcgcggcgggcgggcgactgcggggcgcgcgggccggacccggcctctggctcgctcctgctctttctcaaacatggcgcggggccgggggcgcaggtggcggcgccggggcccgggccgggctctcgtggcgccgcgcggctcggcggctgccgggcgaaccgcaagcggggagcggaggcggggcaggggcgtgtgtccgggcgcgggcggacgtgtccggctgcccgaggccgccccgctcgggactccccggggaggtggagtcgggcggagtcgtccgaggtccggggctgccctctggggtgtgagtgggcgagggccaggggcggagagtgcgaggccggcggggactggcagagccgtggctgcccgccgccgccccctgggcacggcgtgaccttgttctggggacccccgccccaagagggtccgtgccagaggctgccgaacccggggcggggtttgaggttggggtggaaggcggctcccgggcggggtgtgagctccgagcctctagggcttcgtccagtgggagtcgggggcgacgtgtggtgagacccctgggtccgcaggccgccctgactcccgcccggctcgacccgagccgaccctgctggaaggggctgctcctccagccaggggggctttgtgtgagaagaaggaagcgcggagatgcgcggaatgtttcttctttcgtgcgtctggggagtgttgaagtgagtccagtaaccagacggctacggattgttttcatagtggaaacttgaacgtttgctcattctgcgggttttggaaattttgggaacgactgtgaattgattaaacgctttttatttcctcgaaggaacatcactcacgttgttccttttcttgagtgacagttaatagtttgattcagacatctgtatagctggttttcaaggaagactgttggctggatttttcaaaatagtaaatcaggttggggtaggtggttggtatccacaaagggatgagtgaaaaacttcgttagcagctgaactgagacactagaagctaaaatacacagcctcagtgttagcaactaaaatgcagtgaaagtacatttctgtttctgaaactggacaaaagatgttgaaatttttttaaaaaatcaagactgacggtgacgattataatcagtcctaatagctaccgtctatgtattgtgcattactacgatgtaaatgcatacactattgtataattacattatttaatcaccacaagtaaactcccaggagtagtggcatttgccccactttacagatgtgcaaagtggggtacagacacgttaagtacccaataacttaagtgctaaagctaggattttcactcagatctcagtttcccaaacctgtatgtcatatatatatataaatatgtatacatcatactatctggcgtagcccatttttcttcttcagtcgtctgatgagcaattggtctttattatccactttggattctgtcctcatgatttgagtatcagataggcttcattccgactcttagcacattgttgagtcccttcacgtgggcctgcattagaggaaacaatggatttttgacattggcctagggaggaaggcaggataactgtgtggacatttgggagaatcagtatagttaggcatgaaacacaggtaacatttccacaccgctattaacttgaataacacagtgcactcttttccaccagaagtagcacaagaagcgttcatgtattcaagtaacagtagtggacttagttgaagacacagaacattgctcagtccatgtcctggaggagtttacagtctccatggtatgcacaaaatacaaagctgtccaggtgcttattactctaagcccagactgcctcagcttgtctgcctcccctgttggttatgatgatgcctcagtccacccttaaaaaacattctgaaaaaggtcaaatgctttttatttcctctgtaacttggcttcccttttaaagacttgcacctttttatgttctgagtatgttttaatgttctctgcccaacttctgtctccaacataggtttctctagggaaattgattccttatccctagtgcacagtttagtaccactatgtctatatgtatatcccatctgagaatgctatttgcttcctttctgccatttcataactttttttctttgaaaacgtgcccccaatccaactcttctatgaatgcctcttgaatgtctcctcctttcttggtatgcagccttcagcttaatcctgcctgttatcctccaaatctagttgctttcccatgtttttctcatctaggcttttctatggctactgccaaactaatcttcctcagccttccccgtgaaggtttataagatttcccatttgtattcagcacttagaacaacacttagcagcttatgattggggccatctctgagtatcctaccagggatctcatttctcattactgcagaccttcgagcaatttctctttctcactgactcctgactgttcagccttttcactacacatttagttttgcccctttttttgggagtgcgagaagttctcagccctgacttcctgtgctggtttagttcttgaattctttgtcttccagaactctgcaacacttaacagtttgtgttgtccatttctactgcctgtgctgctacttaactctacttgaatgcgttataggtacccagaggacaagattcatgccatttctttcttttgtggcctcagaacttagcactgtgttttatattctattccacataaatgcttgttgatttctatttgagcattcctttaatatttatactgttttatgtaagtccagtttatgcaatattaacttgtaattccgtataaataatcaggaaaagttgtatggcgtgttgaaagcaattggttatttgtcctaccttcaccagcagttatgcagaaaatggggcaatacctacttttgcctaattcatgagattgtgaagatcacatgagaaagtggtatttgagtttgaggttgctattctgtgttgttgctaaagagcaggactgatgttcaataagcagttcccactgggccatgtgtgttttggttaaacatcctttctgattggttggtacccttgtagtgccagttgttaaatatttttaatatcatttctatagggaggcattagtattcaaaaagggaaatgattagtgtaagctggaatgattgggggaggcttcttggacactttaggacttacactgactttgaagggtgggtagaattcagagggggatttgatgagtgtgaaagttcttttgaagttgtgtccccaactgtcctggggcctactccaagggaggaaacaaggcttttactgactgactggcaagttactcttcagagttaggttccttattctgtactgtggaatttggatgtattaacctctatcattttttccccaatcctaaaagctatagtacatagctggaaacaaaacataaaagtaatcaaagtggaatgagtgagggagaataacattatgggatgcccagtaggactaggcattcaaatggtggaagtcctaagtatattatcacttcaatttacagatgaaaaaacgactcaggtgaatttcttagggtggcacaggggcagaacagagacaggaactttgattttctgattccatatcttgtgccctatatggtgctttaaaatgtgaaggacttggaggtgggagtgggacagggttgggataggtggttggcatccacgaagggatgagtgacttccttaagtgaagtaggccttgaacttcacagaatttatgaaaagtgaattctaaaggtggaagggagggggaatgattaaagccttaaagttctcaaggaaaaggtcaatttttttttaattgctgataaaaggacctggtatatacttattgattgagaaaagtaggcctatagtagtttggaagatggtcttgagtaagtacagttaattgaattggggtgtagttagaaggctttggtttagaatattagatgatccgctttgttgttgaaattaagagaggaattgacataaaaataatcaagaggaagataaatcttgttcctgtgaggagggccgctcatgtagggaagacccctgtcaaaaggttctaggccttagttgagcagttacagggactcaacaccattcttgtagtgtcattttattgcaccaaatatgttcatgtgtaataaatggaattttgaaaatgccattatcctatggatggcccttctgatgtgagaacgtgtctcttcaaaccacagagccccttgcaaatgtcgacacacctcttgccttttgcagttcttccttggtcatggcttacgtaacacagagttctctgaacagatggactgtggtttgatatcatgtgattgggtcacatctttgcttcctgcttttggaattgagggcagatgctggcatatttctcagggattttttaatgctttgtcccatagaactagcttgaggaaaagttttggagtcttctcagaatttatggtcagttttgacccagcctaactccaatacttaggattacatttaatgccattcttagctgaattttctcaatgtcaaatccaggcagtctccataaacattaaaattgtttaccactctgaattagatccaattttatgtgttttgtttgctttccaggtaagtttcttatggctacccttcttcatcatgaagaaaattggttggtagacttgtaattattcatctcagacatcactttcttaaatactagtggactaagttcagttggttttatggtccaattttatagatcagatcaagtcttttataaagctgctccctcaaagaacaatttctaatctaacttaaaaaaaattgacttgcaaagtatacacacaggttgctttgaaatttcttgaagggttgcaagaatatgctacatattctatctgtcttgtctcgtttaattctctcttctctctttttttttctttgaccatggctaatacggcatcatttagttctcataaccaaccttgaatggtagttgtatagagtaccaaaacttcttacttatttgctgcttaatttccaaactcttaagcccatttgttcccagatacaggtgaccagtgctcagaagataactgtaggttttgataacatcggctctaccccaagattcttttcaactctaaacattatccaaaggtgttagtattttttcatcgtctaatcgtaaatatatatataaaagaaagacactgctttgaatggcacagatgtagactaacagtagttcagccactgagactcaaatgattttgtattaccataaaccccatctgcctgggcaggcagaattgacacaattttgctcagattggaacctagttcatatctatgaaagaagaccctctttgtttccattttatagaccaggaaactgaagttatgctgttaatgaaaggtggagccttcagttaagcactccagggtatgtactcttttcctatacaaatgctcctctacttatgatggggtcacgtacgtccatgctcctttcatatagagtaaatacattgttagagccacttcagcaggaaagtttcctttcccttttttgcaaaccatgagaatttgcttcagattgccttgattacagttttactatttctttgcaactgcaggccattcagatactaacagtctttctttaacattatatttttaggtaatttgaatcttcctgacgagtccagtgatagttgatcacttactatttgtattgatttatacatatattcatagcaaattcttttcttctaaaagttacataagcacaggactgaaaatttgtattagagaaaggaaaaaaaccatcaccagccattattaacatttggcatatcctgcacccatgcttttttttttttttttttttttttttttttgagtataaaaaaccattcttgggctgggcacagtagctcacacctgtaatcccagcactttgggaggccgaagtgggcgaatcacgaggtcaggagttcgagaccagcctggccaacatgatgaaaccctgtctctactaaaaataacaaaaaattagctggacgtagtggcaggcacctgtaatcccagctgcttgggaggctgaggcaggagaatcacttgaactcaggaggtggagtttgcagtgagccgagattgcgccactgcactccagcccgggcgacagagtgaaactccatctcaacaaaaacaaacaaacaaaaaaacagcaacaaaccattctttaatcattctatttcagcagtttatgaaagctaataaaagtgtttaaattgacaaacagcttcagtttacagaggaaagagcttcagtttacagaggaaatagctcatctattcttagcaaatatttagtagtgatcaacatgatgagaaatataggaaaagtaagaggcagtcttgcttttgaaaaaattgatgctgaggaaatatgactacagactcagtactagcaaccacagggactgctttacagaggaggtaggacttgatctctctgccttgcaggaggatagggctttgagtggatgtgtggtggaaaggaggcacttcttggctggagaggatggcatgtgtggagaaagagcattctaagtttcaggatttctaagaggagaaatggaagttcatggtgtaaagggtgggctcagagaattatgggccttgaaaatcaggagagtggttttaatgtggaaaaagaatgtctaattgtgccgcagagggaatggatcagggtggctacccagttggtttgatggcattgagaacggggtgaaatggtgactgtatgacatttgaaacaaagaaatcagaggaattagtagtagggcctgtgtgtggctgttcccttgcttgtgtgctcttccctcacatacctgcatggcttcctccctcacctcctgcaagtctttgctcagatgacacctttttctcagtgaggcttatcctgccaccttttaaaatattgtcatcatcctacagtgctttccttctctgtaacaataccttctaacatactgtatttatttacttatcatatgtacttatttactgtttattgtctccttcctatcattctatgctttgtgaaagtggatgtcttcgttttgttcactaatgtatctcaagtgtatggaaagtgcctggtgcatcctaggcactcagtaaatatttgttgagtggcagtaggtcttagctgtaaagaggtggagtacagaaattcagagtgactccatgaaagaaaaaagaatgactccaagcttttttaggctggataatgcctttaacttaatgagtaatttggcacgaggattaaggggagacgaattctggtttaagcatgttgagtttgaggtgaaggtagccaaataaaattgctcagtagtcagcaaagattaaaaaaaaatggaacctagttggaaatgggagagcaccttaagcaaagaaatggctactagcatctagcattcacctcatattctctctctctctctctgtctttctcttttgggggtaggaggattctagtgtcctaaaacgctaccttaaatggagtttttatttagaccctgaagtcctagcttgtatctggagtcctggtccgtttgctgggatatggttctttcctgttttgcaggttcatgctatttttcccccacctctcttagtaaagatgtatatattcagaattacttgtgatcttctggttgtattgaaattaaccttcagacagtgctgctttctctgcagtaatgcgtttgatcttttgggagtgtggttcttggctgagataaaagagaggaagtttcctgcttgcggcctaggcctcaggtcatggttgctgatgttacaggtgtcagctttactatctcctggagctccctgatggctatccttttaaatgcttttcctgttgtttttctcaatgaaccaaacactggtgcagttgtatccctagaccatctctctttttctatttggattgatctaacttaagtttttctttcagttttgaaggcagattaaattcatgtgacttggttgtcagaaatttaatgaaatatttgtttataggagtagtatataagcaccaacatatctggctgtaattagagtctaatcagtgtatctgtgactcacttttcaaaagaggatagttcctaatttacctgatcgttgtgaagatagtgtacagtagtatttacacttagtacatagcctgacaccagtaggtgttcaataaaggggaattattatatatttaaataagtgaaagaatgtcttctgaaagaagaaatacatgtctgtgtaatgaagaactagaattaattggtagactgaaaggcagaattcagctcaatgtaaggaatgactctctaccatagctgtcaaaatggaacattgtaaggtagtatgttccctgtcaccctggaactattcaggcagaggctagataaccttctgtctgagaaattgtagaaggaatttcttacattaggtaggaggtcggacttgtttatctctaagctctgtttctcctctaaaattctgtacttttgggcataatccaagcttccttgcttactggttttagccaaatatagtctaaatatccctaggattcatggcttcaagatgagcagtatcttgttgctcctgtattatacgagaaaagttagtttatccattgattggcttttattttggtcattttccaaaaaaggattttggaagcttgaaataatagcaaattcagtaagaccaaatctactgaccacaaaagataagaatcagtaagtcaaaaagggaaagaaaaagagaacaattatccgtaagtttagctgaggaaagctttagaagttgaacacaatacttagctctgagttttctggtaaccaaggcaagtaaggaagactgataatttgcatagatctcattgcctatcgagaattcatgaggagactgccaccttccttaataaagtggagccccaaatgccaagattgtcatacagggagaatctccaagtggtaaggggttattgctggatctggcaataatctgattcttgttctgaggcttcccctttaacacgtattgagggttcaatttagtgctgctgcctccatctttcttctccagtttaagtctctgatccaagtatgaacacattagtctttccctaatgccaatggaacagctgatgtaaggctaggacatttaaatcaagctttgctaaaagctggaggataatgaatagagagcaacatgaaactatttagtctggcttacaaagacatttttctcatgcccttatcttttggtgtgtctccatttgatacacttcatcagagtactgctaccaaaggcagagccagacatttaccttcaaacaggtgcaagtcagtaagatccagagtgtctttgcttgggtttcttgtttgaagaactgcttcatttctgagtaatggacgttcggaatgattactttaggagagaccacacttatctgagagtgtggccctactgtactggtctcacagtaatcccagtattcatggaaaagataggcacgtacattagcatgagggcattctgtggttagaagcattctgatttcattgggaaaaacaagcttctctctgttcttgagcagaagcttttatagaagtctttgtacatgggccattgaaaaataaagtgaacaattcgggtttatcactcatgatttgtaaggattcacttttccttttttctgcagttgctgtactacttcaggtctgttccagtgtttccttgttctcaccaccaagactgaacctccttatttttgttcatttgcttcaggaaaaccattccatctagatttcctaggtgtaaacctcactgattacataatagtgtatatttatagttctaggacaccttcttcaggcatcctgttacatttctacattataagattcttaaatatgcattgaattacaaataggtccccagggaaaaggcaaaaacgaatggctttttctgcgagaaactaggactaatatagatatttgggagcactgaacatggaggatagagttaaacttgaaaagacatacagagatagaaaagcagcaactgccctttcatttgtatgcaagcacacgatatatgtatgggttttttattttttgcttgatgtattcatttccaaatcaaactataatgtgctctaattgggtctctttgttcagcacgtggttgttgatttgagtactttctccagttgaaaaactgacattttaattttgttattcaatgtgtgatagatttaaataaaaacacccaagattgtgtattgtagatttccttcaacaataattatatataattattttatcaaaataaacaagttaaagtagttttagttattttgtctcattttacatttgggaaaaaaattacaaatcaggggccagagtctggtcatgtttgtcagtgaggaaagacaatttctgattgccagtcccaccaaagcgttggcagattaacacagcattgtagattactttcctaggaagagatgctccttttttctccctttccattattttgctttccttctttccatggtgcattgtccttttgttttcttccctcttatttcgatgcatgtataaacttgagcctttctgctctcacattctttctccccatgatcataattgtttcttcactttattcttaaaaaaaaaaaaaaaggccacataagtattttatgtagatctcatctatcatttaagttttgtcagatccagcctgctcttgccttaccatgggagaagggaaaggagggaggagttttaagggattttaggcatcaggcagaagtcttaagggaaaactctgcgaggaccaacaggctcagaattagctgtgcattgcaaacagatggtgtgtccctgaggaaatagcgtagttgccctaagcaattgggtgcttccatctgatttagcttagtctctgtaactgggaaaaaggaaaatcttatggaagaaatgagtataatcacctgtgaaccattctaaactattatctagagactagtgattattgacttacatatagatttcataattctgcaagatagtcttcggtgttgtatcatcagttatccaaggtataaataacatcaagacccttatgcctctgagcctgatagatccttatcttttaataaccaaccccccactttcttcagtagccatgatgctactgtatcaatgctaccagcaattggaaacccatattcctaatgccaagtctcggcatgtagattttgaggtctgaaaactttattagcttggttacagtacatctcaagcctaagttttcatatacacatagtttagtctcaaagggcaaatgtttccctgaaaggagttcagtcaacactagatgcttatatctttaggctccaagggagtccaaaatttaatgattaaaaatattataaaaatgcaaatatagaaataatacaaaagctccttccttttggtgggcttttctgtccttgcttggttcaattcagctgtgttcttctaggagactgcaaccacaatttaactgctttgctttggtattttgtttgacaagggagatgaatgtttcagatgagacggagtctcactgttgtcacccaggctggaatgcagtggcgcgatcttggctcactgcaacctctgcctcctgggttcaagtgattctcctgtctcagcctcccgtgtagctgggattacaggcatctgccaccacgcctggctatttttttttttttttttgtatttttagtagagatggggtttcaccgtgttggccaggctggtgtcgaattcctgacctcaggtgatctgcctgcctcggcctcccaaagtattgggattacagcgtgagccaccgtgcccggccttcaattttttgctttaagttagaatcctgtttgcttactttttctgacccaaatgttttaaaaatgttttcctgtgttttcatttaaaagattggttttacctctcacattgagatgtatctggagttggttatttattatggtatgagatttttattatttttaaaatacggatatctggttgactcagaaccatttattggtaaaaccttttttcccccagtgtacaatcaccttcatcataaatcaagaggttgtatatgtgagggtctgtttctctgtaatctctgttctgtttgcccatttgtccttgtgccattaccatactgtcttaattattatgatgttaggagtcttgatatcgagtagtgttaagtctttcaaagattgctttggttattcttgcgatgttgtttttccatataaatttcagaatcaacttgtcagttcccactgaataaaaaaaccctgtggggattctgatttgattttattgaatctacagatcactttatggaatattgacctctttacagtattgaatcttccagttaggaacttgtcacttttctccatttataaatacattttaaaattttattttatctcctttgtaatttctatcaataagtaatattttttaagctttctctgcagaggtctttacctgtcttttgttaggtttattcctagtttttagatttttaaaaaacgttttctatttattactggtttaagaatgattttttaatttaattttttttggtatagtgagtaaccttatattagtgaccttgctagattgactaattgattctaatagttgatctgtaggtcacttttggattttccatgtacatagttgtcctctgcaagtaatgatagttctgtgtctttccagtctatcttccttttgtttatttctgacttactacactcagacttctaatacaatgttgagaagtagtgatggatatctctttcttatttgtgatttcaagggaaaatgacagtcatgcaacattaaatgtaatgcctacttttatgccttttatttaatctgattatttcagaattttttttaaattctgcaatttactgaaatttttaaatatcatgaatagctgttgaattttatcagtttactaagatttttaaaaatcatgaatagctgttgaattttatcagtttttttgtttttgtttacatcacctaaactgccaaactcccttactgttttctttcttttttttttttttttttttgagacaggatctcactctgttgcccaggatggagtgctgtggcctgatcatggctcactgcagcctcaaactcctggggctcaagtgatccttgtgccccagcctcccaaatagctgggactacaggtgcgtgccaccacacctggctcaaacttttattttggcatcttttgtacaatgtttttgtatatcctctacctaaaatgactttcctttcttcactagctttccttaagtcttagtttaggtgtcatatttcagagaaatctcccttttctgtcctctgatctgtgcactttgcatcatcatttatcagtggtgtgttctctgcattgtgaatctgagggcaggaatctcaatcctaattatctctatcctcctaaaggttttttctttcttcctacacaggttacattcactgttgtgttctgagaaaaggtgttcaggccttgctttctgcttctaaaattactaactgcccaggaccatcagttcatttcttcaactgtggctccaacagatctttcgctgtttgctggcccaggtattgctctcctctgccccgagtcaatggcagctgggagtggttaccacttccttctcttaccacagttccttctctaccacagttctgttttgtatgtcattcccctagcccaggatgatcagccactttcatttacgttcattattacaccttattatctgtgcaaccaagccagtctctcctacagccactcgtgctttccaaagggaaaggttgaaattttcggttttgtcctacgtgaggggttgtggggagtaggggtggaaatcactgtagattatcaagtaatcctttttttctttgtgtacttttggaataaatctagattatgttgatgtaactgttaggacatttctgtttcttcatctctaaaggagctgggatctgatatttctgttcatattccttccagcatgaacattttatggctaattagatattaacttatttattagggatattacatatacacactgggtgtgtccctacactgttaatttgggttggaactgaaaatatactttctgtgtgtgcctactgctactgtagtgaagttcttgagccaggtctgttcagtcatattgttgaaaaactgtatgaatatttatgaaggagaaagagctgataggtaccatgaacattcactgttgtatatgcatatggtttatattgtgttctgtgtcagtattgcctaccagagctgtctcaacattagctctgattctctgtctagcatctagaccagagactggcacgtaataggagctccaaagaaatacttgttgaaaaagtgcataaactaatttttgaacattttattatgtgctgggcactgtgctaagtattctatgtatgttatttcattaaccctcaaaccttctgagattggtactgtttgttagtatgttataaatttaggaagtaagttgaagaaatttaggttcaaataagttaagtgacttcctcaggattactcagtgcctgactggcaaagataggattttaacttaagtttttctgtctctgagttccatcaacttaactaccatatccttataatacctacccactagtcaaattaaaatctaataagaaactgtgtaaaagcatacttagattgagaggaaataagaaatttggttattgttttagcactcacctttagacatagaagtttctccatttcttttcagggcctggggtaaggcaaagtgtgcacatctgctctgtatattaaaatatcccctcaactcattgaagtggaacaaaaacaaggtcacttgacaggactgtaattgtaatcacactatacagctttacttcctgccctttagtagtaggaccattcccttgtccttaaacatgcttctaaaataccagttttaatggctatatagtctttcatttatgattgtataaggattcattctgtcattgtattgtcattcacataggttgttttcaatcataaaatactgtaatgaacatctgcaagtttagatttttgctctcacctattgtttcctcagacaactgtaagtagtagaattgatggattaaaagatactttttaaaggctctgactcttctaaaatgtgttgttaaactcctcagatctgctaaccagatctttatgctgtacttgtgtgatttatttcgaatctaagtgaaagcctttgtattagttaccctgttaaatcccatcttgccatttgggcagcctattcttagtgtgttttctctgatatcagttaacattatattggctaattccatagaaactaggagactggaaaatgaagataatgtggaaaaacaagagcttgtgaatttgggagtgccctgttcttttaagatgtgatgtgggttaaatgataaacaatgcatcttaaattctttaaaagtggcagaagtaaatggaatttatctggaaaaaaatcaggcgtttattctgatgccctaaattcaggggtgaaatattatctggactagaggaaaattttatgtacattatatggtgttctctattttgacaagcttactttgatattactgctgcaaggtagccccaggagggttgaattgagaagaactgagtattttgaggaacaaaacctaggatagtaggctggagggaattggaggtcagggttttagccatgtatacagagataagcaacatatttaataaaaagaaaaggagaatctatatagtatgctttactccaaagctggatgagggagaaaagaggacacgtctccttgagaagggggcatgtgttgagaatggagaaaaggggtaaggcagattactcagaagaactggggtagaagaataggttggatgataaaaggggctgacattagtccctgaaagttttttttaaataacttccaacttttgccttcacctttgccagcagtgatgtgatctgctttcagctgtagtgaagcaaactgcataaaggacattgtgcatgttaggtcttttacttgcctgttggtacatgtttgtaatatttggaaatactctcactgcgaagaaaagtatagttgtgctgtagtgggtagggtgaggaaaataagggtcatcaccagcaaagtcagagtgatgaaaaaactggattacaacactctgcttgactttgcatagataagtaagccaagcagagtgtttcctggatgtagttaaaatacaagcttggagcacaggtaaaaggccaagaggcttggagatgtacatctgagatgtaccaaagggccaagtgcaaagtaagtttgggaagtttagtgtcatataaaaactaataaagaaagggtggtactctgtctcatatcctgaaacgttttgaaaagaatattgaatttgaccagaagggcattgctagtgaatttcaaagagagatttcagttgagctctgaactggaggaagatgggtgatagaaggctggagagggccagtaacaagggttgaaaaaggaaagagtattcaagcgtatgcataaaaagactacgggtaggttgtgtagatgatgacacactaagcctgggaagacaaggtttcggtgctaatttttatttctttaacaagggtgatagaaatatctgttccatatattaatactatacacaactgtttacctctcagcttttctagcaagacatatgggcttgtgaattaaccctgggtagccctggcattagatagaattaatagtgcttccatatgtgacctcgagacgtactgaaatgaggcaaccaaggaaatcctttatattgggaccaagagccaagatctcaacttgggatatgttaccccgagagttgttaccccgatactataataccatgaataataaccccaagggtcctgttgtctctttttcctcatgtcacttcctttggtactaactgtcaccatgctaacatctgcaaactttgaaaattctgatttattctgcaatatttggaaatttcactgctagtaattgtatttcctggcatggttctgatataattttctgtgtacacagtagcttttccttttagtgctgaatcacactgaaatccttgtttaacctaagttatagttgcaagggagctatcaagacaaataattacagtgatggtgaagtgaatacaagtcaaacatcccaatctgaaattcaaaaccttttgagcacaccaacatgatgccacaagtggaaaattctgcacataagtacttaacatgacctttgtttcatgctcaaaattatttcaaatattatattaaattaccttcagactatatatataaagcatatatgaaacatgaatgaattttatacttagacttgggtcccattcccaagatgtctcattatgtatatgcaaatattccaaaatctgaaaaaaatcccaaatccaaaacacttctggtcctgagcattttgcatgagggatactcaacttgtaatcttttctatgtatagccaagtttgcacatacataggttacaacaacccatcatgtcttaacctttcagtctggaggctggagttttctttttactttgattgtaaattgtattcagattttagaaatgtaaagcttagagaaatgtgcatctcaagattaagaaagctatgcccactgttaaagactggggcatggaaacaaagttggacagtgtagtagaaaggtcctaaacaggggatttggttcttatttttgctatcaagcagaagagtcaaaactgtaggagtctaaaccaaatcaggtccacctgggagtctttaaagttcagggttacttagcatggggatagtggtatagcaaatagttgcgtaggtttcactcgtgggctggtgataatatagtgaggattcacatccgcctgtaatctgggtagaatatttgtataaatcattttggttttttggttttctttttaaaatttttaaaattgttttgcttttcttaagttttggtttctacattaataaaatgacagaactgaattgcctagatgatattcaaagtttcatgtggttctgttagtctgggattctacagtggaattttgtcactacttttgggaagaagtttacctttggtggcctacgaataaaaaccacattggcacaatgccatttatcatatgggataattctgtgtgtttatataatcatttatgttcgtttccaaatgtgttaataaagtacagtatctcatttgattagctcagatgatgaaataggtcagagaggtattatgtttattttcctgatgaaataaaacatcgtagttagcatcttgaacaatttaaatttgatcatcttacttggtatgccagccactaaggatgaaatcctgccactgagaaagaaaacccagtcaggaaagctttctcacccttatctatctaacaaattgtacatattctccaagttctgacttgaatgctggtgaagcttttcttgataatctcttctaccgcagcagagtagaaacactttgatcattcttctcaggactcaggattttaattatctgtttaatgcctttcccttccaccctagtgaactactcaagtgcaaataccttgtcttactcatctctgcacctcatagcccacactgtacctggcatatagagatgcttagtgaataattgcagaattaaatgaaagagtcaaggtgatgtgttgcagagtgaggagaacttgggctttgggctggcggaaggaggtgtcttcgtttacgttttttagattgaaattttgccatgtatatgcgtttaaaaatttaaaacctagttgaataaaaggttggggggggcagtatccaggggccaaatctatctattaataaaataaatttgaattttttaaaaaaatggcaattaaaactcatgttcatggaaaaaattaagttcttattttagtttttccctaaacgatcttgccgtatcacataacagcagtcttgtagtcaatcaagactgacttcaagtggtgaaatggaattttttaattccctgaagagagaaatctttacctagttaagctttgtgttatcttgatgtttttatttgtctagtgacctcttctgattgaaagagtagttaagaaaaaccctttagtactgactttttcaaatttaccgtaatgtaatgacctctttgaaaggagaagtacagagtgtatttttcataatgttacttaaattctgtagacatgaaactagatataaaacccttatgttcttggctcatacaccactataaaccaaatctgcaaattaaatacaaagacaactacaaaaaaaaacaaaattcaaatgaatacaattattccatgtgacagatgatgtttaggttttgcagtagaaaaaaatagctttaggtctaattccattttaaatgtgtttctgtattttaacttcagtgataataaaagctgtgagtagtgcctcttctcatcagtaatgttatgcaggagggcattaatgacttcaaggccttgttggtaagttcaggatgagacatcatacctaaccaaaacacttgacagcaagcattcctcaaatacaggcttataagttttactgagatgtcatccattttgttcattggaagataaggttaatatcttgacattattgaaatcttcattaaatgattttctaaaccagttattgctggaaatgagaatggaaaaacattgcatacctacaattatatttactgctaacaaatgtttgcaaattgtactacacatgtaggacccatatagcacttgcatataataaagtacatatatggtattggctgttaggctattggcttttgaatatgcatgccatgcctgtattgccatatggtcgattcaaattccctttattttttactctttcttttacaatgaccatgaaacttatgctgtgtgtagtgtgccacaaggacatttggcctgaaggggatcttcacacagctgaagaagcagcagtgaaagcctagtgccagtgttgagacagtggctactcatgatcttgaatgtttatccttgtttttagattatctttgaagtgaaaatatgttctcaaaccttgtacccaacttatacatcctttttttctcccagcatatttgggagacattgttttagcaaatatttttctgatcactatctaaggagccaggattcagagatgtgaaaaacaaaacaagcttggcccttcctgaggcaatgaaagaccctttaacagcaagctataaatagattgatttgtgctgttctaaaggtatgcaaagagcactatggaacatattgaaaggagataccaattattgtgaaggtaagggcgaggtttagagcacataatggcaaagatcctgttgaaatagggtcttaaaggatgagtcagataagaagataggtttaaactagacagagagatggtatatgtaaagaccaaggtcatgaaagacattattattataatggtgagaggtgtgtggccctagatagcatttgccatgtgagaagtaaattggaaccccaaactaaaagtcttgttaggctaggtgtttagcccttatctcatcagcataggggagccatggtgatctgagaactgggagagtattcagggcaatattttttatgtatagcggttaccacattgtattacagtgttctccttcacttgtcattggagctcttcaagtgctgtgaccattagttattaatctttgtgtgctaagcttttggtagagtaactgataaaagtaatgcttagaaaacatgggttgaatgactaatcatgagtaaagaggatttaggagagaattatgacaatgtccttcggtggtagttttaatgctttgtgggtcacagactccattgtgattgacttggaaagcttttccttgaaaatgtaaatacatataacatttggcttatagttttatgggattcatgtacctctgaagccagtccatgaattcctggttcagaattcctccttaggaaatcatacccagacagccatcaccatcacaccttgtcatgaataattactgtctcttttagcagtctttattacgattgtgtctctttcttgtcatttccttgagtttctttcatacttaggaagcaaatagctgacctgtctatgaataaagaaagcgtttttaataatgattaaggtaaaactttactggtctgtaaagataatagacaagtatgtgaattaagccagcaaccaagaaacagctacttgagggagaacctgacattcctgaatttgagttgagcaagtgagttgggagtctgcagggccatcctcagacttggtttgctagaaggactcacaggactcagaaaagctgttacagtcatggttatagtgtattacagcaaaaccatacagttaacatcagcaaaagcaaaaggcacccggggtgaagtctaggagaaatcagacacaggtttccaggtgtcccattccagtggcatagcatagatggccttaattctctcaacaacaatgtgtgacagcatgcacgaagttgtcaaccagggaagttcgcttgagccttggtgtccagggtttttactgttggtcagtcacttaggcttgcagcatctgcatgacaggcttcagcccctcagacttctcctacccggccccccagcagtaataggtgttcactgtaaatcacattgttagaataagctgtctgacaaaattggtaccatgtgacccaaggcctcaggcatacagaaatattcttatcagggagaatattccaaaggttcagagctcatctaccaggagccagccaaggccagttttgaagacaagtctttcttgggaatatgcagggtttgagcaactcagtcctgctgagttaaccctttcttgtacagcaagttagctcttcagggagttagctctgtctatcctgcccctgtctgcctagccactccttttctaggtagagtggaccttgctgttcacgtcatagatggccattccgtgtacctagactcctttttattcctttgccaacaagtaattggaatgtttggatttaagaacatgtctgtgctttgcaatttcatgtgaccatggtgaaattatgcacacattctatcattgtgattcaacaagtattttttgaatgctgctgtgcatgaggcatggtgttagatggcagattgacagaaatgactaatacaggtatctggcctcaaggagtttacagtttcataggagaaagaaaaacaaaactagcaattctggtaagcagtatgtgttttggagagcacttaacttcatcagagagcatggttgaaggtgtatctgtgtgtatgagaaggtgttggtgataattagaaggcttccctaaagaggtcactcctggggttgagccataaagatcaagtagatacaagtgggcatgaagctagtattttgctgccagtcatttctgtagttaggttgcctatgtggttggagcatgtatgtattgttacaggtgtagtctgcttggcttccctaagagaatgccccagtcctggccagaatatacatgtcttttttagggtttgcaccaaggggaatagagagtgtctggctcagtacaaatctgtttccgttactccattatccagaaagccactgaaatggcattagcctacacttaatgggtggtagtgttttcacacattgcttctcaaaggaggagtatgtgaatgtttagtttgggcctggtaaaaaaaaaaaaaaaaaaaaaaaagtataaccattacaaatttaaatgtactttgtttctaatgggaaggcaaatgcttgccttgctttgatgaaattgaacataacaaaatttttctatacttggaagcaaaaaacttcaggaaaaaacctgggtccaaatgttgctacatttccttgggcttccacgtgtatgtggttcttaatataatttgaaacttctaagagcaacaaatagttgttttttgcttctaagagcaacaaacagtgcatagaaattgtgtgataataggatcaagaatgtattattagagtgaatattggataatttcaaactgttaaccttgagattttttctaagaatctttctctttttccagcgttacagtgtttctgccacctctgtacaaaagacaattttacttgtgtgacagatgggctctgctttgtctctgtcacagagaccacagacaaagttatacacaacagcatgtgtatagctgaaattgacttaattcctcgagataggccgtttgtatgtgcaccctcttcaaaaactgggtctgtgactacaacatattgctgcaatcaggaccattgcaataaaatagaacttccaactactggtaagttgtataaaatttttttcctagatactacaagaaaaactcttcatactctgtgattttagaactggaagggatcataaaaattgtctaatccagctcattccgtttagaggcaagaagtgacttgtccattgttacagacttataagagtaaccaagatcctgcctcctgggtatgtgttgtttaagaaggtggttccagggtggacttcctctgaggtctgttatacctaaaaggatagataaaagcaaactctgacaaagcccacaacaacatcttcagattgtctctactttgttctcagagtgaatttcttcttccttgtataatgctcctatcttttaaagcaatcacagtcttttaatgagtggggattcagagcagcacttaacagtctagatgttttcattttgtaatttcagcttgttttatgatctttttgcgtaaattaattatacatgatttctagatttttggtccttcacctgtagtttacatttaaaatttcctggggctgggtgcggtggctcatgcctgtaatcccagcactttggaaggcctgaggtgggcagatcacttgaggccagaagttcaagaccagcctggccaacatggcaaaaccctatctctactaaaataacaaaaattagctgggcatggtggcacatgcttgtaatcccacctacttgggtggctgaggcacaacaatctttgaacctgggaggcagaggttgcagtgagccaagattgtgccactgcactccagcctgggtgacagagtgaggctctgtctaaaaaaaaaagataataaataaataaataaaatttcctggcagaaccagcagtttgaagacttcataaactttttaattttaagattccggtttaatatggaagtctgagcacatgtatttaactcttacctctttccccagatcccaaaggaatataaaaatgagggcaacctgtattaatgctagtgggattaatggtagaatgccacccacatgccagcacttgtgaggaacttctgcaatttacagtacagatgacaccagactagtaaagaattgactagccatataagaaaggttagtcatcgaaaagtccagccaataacttagacaaaggatttggggggtgaggttagggtatgggggcaaactctcagttcccttttaggaagcacctggcttcagtgctcagaggagcagacacagttgctcactctccactcaaagttggtccaggccttgtgctaattaaaggaggaagcactgctgtagcgcagaaggaaaaggccagtcctccacctgttcagcatgataatgcagctcccctgtggtaagggttggtcggactacaatatctttgtgactttgatgaaagcatctgcagttataatgtggcaaagaaaaggataattccagaatttcccatttccatcatttgagcttgaaatatctgaatagatatttacaaaaccttgtgaagaagtcaccttatttctcatgtttctaatgaacatatataaacttctcatttccagctctaggataagcaaacagcaaaaaattaccaatgaaaagttaggagttcaaaagaagtagtctgaactagatagattagatgtcatcctgtgaaataggtttaccacatgatagggaagaactttcaaacagtacagggtctattttcagttattcactatgaaatgagaacatttcacagttgttaaaggttgctttcagaagaaaagcccaactgatgaatgtttttaaaaatgcactattgagagcgaacaacagactggatgccataattttatagtcaagtttgggacaagttttaagaaactgtgttacaattcagagaaaagacagttggtgagcatattaagagatatagggaacagatttagatgatccaatatgcttattatcagaattccagaaaaaggcatgaaatcataaagaagacagaataccaggcaaaattaatgaaaaaatattaatccaaacacatataataaaaagtatcaatttcaagaataaaagaattatataagcatttaacacacataaacattggttacctgtaaaaggtgaaaaaaaaaaacaggttcagattttctgcttaaatatcaaagggcaaatggaacatttttacgatcacctaaaattcttgaaataggccaagatttttcatatacaaaggcaacagccttcttgccacaactaagttcagtgtacaagggtgcatggactcttcctgaaagaaattactagaaataggattctgtatgataagagattaatctactgaagatcttaagaatgggaaagatgtgatatgaaagaaatggtggtaagcagtaaaccagtaagactcaggatgaatgtcaaaataattgtaattttctgaaacaaccagaaaatcttaattattaatagaagttacaagaaaatgatctggacttaaaagtccaggaggttaagatagtataaaaagtatatatatgcaaactctgttaaaaaaaaaaagtaaaagatatgttctgcctttaaaaaattggtggacctattggccgggcatggctcatgcctgtaatcccagcactttgggaagccaaggtaggtggatcacttgaggttaggggttcgagaccagcctgagcaacatggtgaaaccccgtctctattaagatacaaaaattagccaggtgtggtggcacatgcctgtaatcccagctacttgggaggctcaggcaggagaatcgcttgaacccgggaggcggaggttgcagtgagccaacatcataccactgtactccagcctgggcaacaagagtgaaaatccatctcaaaaaaaaaaaaaattggtggagagatatatactgaaatgtgagttgtttagaagtgatgaagatgtatgtggttttttttttcgcttgttttgatattttgttgttttttttgttgttgtttttcttgctatgagcatgtactggccttggaacaagaagacaagccaaacattaaaaaaaatatgatttttaaggagatgttaataggtattgttacaggttattggtattagtgacctgatgtgataagtggggaaggtcctatgatattggcggcagttggccttgtaatgatggctgaagaatacaggagtaagtgggtgctgacagagctggtgtgcataaaaggaggcctagtgggagaagactgattcacttgttctgggtttgagccctgtaaactgctgtaatgaggctctttggctaagtggtggcagtggccagctgcaggaattgtgtaggattgggaaaatgggggttgccacctacagtgtttttgtcgttgttgatgtttatttcactcgaggccctttttcagtaaagtcatcacctggccttggtcctgtggaactggcagctgtcattgctggaccagtgtgcttcgtctgcatctcactcatgttgatggtctatatctgccacaaccgcactgtcattcaccatcgagtgccaaatgaagaggacccttcattagatcgcccttttatttcagagggtactacgttgaaagacttaatttatgatatgacaacgtcaggttctggctcaggtaacataattgtttctcctttttcctaagacatctttttaaaattaagcgatacttattttattagttttctaataagccaacttgctagaatgtgagatagtataaataatattgcaggtttgaacctaataaaaatctttaagcttgatgtatatatgactgtggctggtttaaaatagattggaacttaactttaactgttaaagcgaatcaataagtcagctccatggtggtataaatttcaaagcgttctcacttgtataatctaatttgcttttcatcactgtgaggtagaaaggataagaacaattattctcatatagatgaagctgaaggtcaaagatattcacatgatctgcagctaacccattctattcaggattgtttagcagcttgatgtttacatttgaaaacaggcatgacagaaatgtattcagaattgtgaaggttatttactttttaaacattatatgaaattgtctttcgtataggcctggttttttaaaattaaactaatgaactcttatgtcattttctcacttgagaaaaatgtctaaccaccttcttatttaatgtagttttggcccctaatgacgttttcttttctcagttctatttgttgatatttgtggcatcagaagtagatgagctaattgtcagagtcatcccaaggtggattttggcatagcagtgcttcatgtttaaactgaaagggggttatcttttactttttcttgcatgtggtttggaaaaatattaagagaggaacactcctatcccctgtgtttttagaatttgacacttggtgaagaataaatagatctaggtttcaaggcaagctttgtcattgattggctgtataaccttggttagaacatgtttcctctttgggcttctgtttcctcatcaaaaatatggaacccatactgttgataaaaacacttcaagtggtttgttaagacttttaaatgagatgtactatcctttgaaaagtatgagtcatcttcaaataagggctaaattcatgaataaagtgaaaatttgtaaagcgtatataatgaaaatttcactaattttggtgaaagcccatctctattaaaaatgcaaaaaaattagccgggcgtagtggcatgcgcctgtagtcccagctactcgggaggccgagacaggagaatcacctgaacctggggggtggaggttgcagttagctgagatcgcaccactgcactccagcctgggaaacagactccatctaaaaaaaaaaaaaaaaaaaaattttcactaattttataattgagtgatattaaaggaatgttaaagcagaagttgtgactgggtaagaatataattctgaagcataaaatcacatctaatgttgcagaaagctcatataatgacaaatgtctatttattttaaggaaatgaatatatattggtatgtatgcatatccattcatttaagaatgaagaaactgattttattacctgaattattcttctatagaatttggccatatgtattcaataagagagctctctccttgactactaggacacacacaggctcgcactggagctcacgtcccagaaggcaagcttagggattcctgaaacagttgtgcaaggaagacaatgagagtttggacttagatgaagcagtcttagtactgaaggtgtgatagtctttaggcaggcctggtggacagaggttattttagagctttcctgggacttcccatttattctcagttcagatcttcaaaaagattttgctcattctggaagtcatcctgctcaaaactgtgataatcaaggaccagagtcacagaaaatcaggatggctacagatatttggaattaatccctcaaacctgttctcttgtttctaaacttatactccggaaagacacagcactcatgccacttgccacagtggaataagcccacctaactgattaaaggaattggtgggtgggtggcagttgattactggataagaatatcttcattaaccttttaagatataaacatgagaaacaatggaataattctgtttccattatatatatatatatatatatatatatatatatatatatatatatatatatttctagatccatgagggaccatagctctctgttctctgaaagcttctctccctcctttgatgccttaccctgcaaaaacttgtctgcattgcttgctagctctgtggctttgggcagttaaccaatgtctcatgcttgagttatttcatctttaaaatgaaagtgatggattctgtgcacatcattggattgttgtgagttcaagcaagacaaaatgtttgcatgaaagcacttggtaaattgtagagttatgtccaaatgacaagtgttactcttattgaaaacatacttggaggaaaaatctaacatacagtatcagttgaccacattgtacaaaacttagtttaaggcctcctttgcctgtcatagttcattgtgtactgaattccctccaaacctatccaggcagaagccatcttctggtgaataatagcagaaaatgccatctgtttcccttctattcattataaatccttaatgccaccttaggcatgagactagtgcctgtgaataagtaaactgtgtgtttgtaatactctgtttttagttctttcattaattgaggaaaaggtataagcatttcacattctgaattcatatgtttattacttagtaccgtgaccataattaaggaaaggccctgtctctacctctaaagactgtgcttttaacttgggaacttcagggaatacaatgaagagctgggttctggcagctgtacgccaagtgtgtgagtgtgcacatgtgcatatgtgccagcttttgtaagtgagtcttctaggccagtgtttgttatggcgtgtgcagcttatgagctcttgtaatatatgcatgttgttcgggtcttatttcctgttcactgcatgtaaagctgtggagtccctgtttcccttttgaagttttctctcaaacagttctaaaggtacagaagagtagagcagagaatatagagatctaaattaggcctattcagttttgtctttagaagaaaattgttactttttttttttttttttttggagacggagtttcactctgttgcccaggctggagtgcagtggtgggatctcagctctctgcagccttcacctcccgggttcaagcaattctcctgcctcagcctcctgagtagctgggattacaggtgtgcaccaccatgcccagctaatttttgtatatttattagagaccaggtttcaccatgttggccaggctgatcttgaactcctgatctctagtgatccaaccacgtcggcctcctaaagtgctgggattagaggtgtgagtcactgtgcctggccaattgttaactttttaaaaatgctcaactattcatgtgaagtaatccaatatagataatacagtggatcaagatttgctttttaattttaattgacatctagaatccagtgataaaggggaagacaaaacctttcctcgtcctgttggcctttcttgaccataccatttacacaagtcctgaacctgtcaggtgttttcagaatttgtgtttgtgattcctttttcttttttattacttgtctttgcaatttccagattagtctcctgaaattaactcttaagtgtacttttaagtctgtggtgtggccctctacaaggctttcataaaatgtaataaattagtatctacactaaacaacataattagaattgattatacatagtgcgaaagagctctatgatttaaataaggatttctgacagatctgtttctaactagcagcctccttataaacacaaacagttatttatagttatactgctaactactttacaggaggtggggagggtagagcaagaggaagaaaggacccgtttgagaaacttaagaagaagagcttctgatcgctttaaagatttaacgtttggatttataagcatttcacatcagggaaccaaagagagcagataatttcatttactgtcattgggttaatttgatctagtaagcagctttgagtatagattataaatgacaccaatttatatgtacatagattgtataaataagatatgagtgaggaacatgatgtacactggcattttctttgttagtgtcaatgtaatttaaaatgacacttaccggatggtggataggatattaagtgatggtctcacatatagtgccacttaaatgttgcaggtaagttagtaaacccttttaaatgaagtaagtatggcaatacttaaaaatacatattttggagaaagccaagttccattagtggaaaaacagtgctccattaccaaggtaagttacttagccttgttcttcaagatactagtgttgtctatgtagccagttgtcagcaagtaaattgctttccttgaaatagtttctgtggtgatttttactgacttatcaaaaagccagaatttacttctgtgtttctgcgttcacatccttttttcctcccatcagtgaaactgttacgagattcatctttctaaaataagattttaaaattatcttgcttccagccatggccctttttctcagaaatctttaaaggttcctcttttacctaaagctcttcattggttattttgagcttggtattcagtactcttcatcttctggtgacagcttactttctcttttcactgctttgccacatatatcctctctctgattgcccaagctgcttccctaaaaatgtgtcattcatttccctctacctttgcctgcacattcttcctgcctaaccaccgtacttaagggatagtcaaaattcaacttacttttacaaagcctaccttgaccctctagcaggagtttctggattcttttattatatttattatcttattttccttttttaattagttattttattgcaaatataatatctccccagtgagataaattcctaaagggatagcttaaagtatcagttttctgggtcactcattagtgcctatcatgatgtttgaaacatgtaatattgttgattgtgttgagtactatttatttttacctttaggtttaccattgcttgttcagagaacaattgcgagaactattgtgttacaagaaagcattggcaaaggtcgatttggagaagtttggagaggaaagtggcggggagaagaagttgctgttaagatattctcctctagagaagaacgttcgtggttccgtgaggcagagatttatcaaactgtaatgttacgtcatgaaaacatcctgggatttatagcagcagacaataaaggtctgtaacatttgcttttccttatgttatatataacaagatctctttaagtctttacagatatggtgactaaccatcatcaaagtagatgagacatagatgtctctcatgtagattagacccattaagtcgaatacaatatattagtaacttttagaactaggaacttcttcaagattttcttgactcttgatagcattcctaaaatctcttaatgttttataaaatataaaagagctattttaaaaagccatgtactttgttggtttagtttagggcagttagttattgagagtactcatgatatagaaaagatatataaacttgctcaaaattttgagaatagggctcagatagctgtttccttttaatctcttcctgaccagtaggatgtttcaatatggactattgaccttattaatggggagagtaaaaataacttgtcagtgttctgagttgccaagggctaaatagatgaatcttctggcaaactcaaagagataaattgtttcttcaaccaccctggtaactgtacggacacttttctgcctatcatgctggtgcctgaggcccagtgtcaggtcagatgctgaagaaggaaggaagcctgtcagcagggagtcagaatgagtggggactgcaagcagtgaccttagactgtgctgctgccactttcttagcttccgttaatacctttatgcccatgattcctactttttttttttttgagatggaatctcgctctgtagccaggctggagtacagtggtgcaatctcggctcactgcagcttctgcctcctgggttcaagtggttctcctgcctcagcttctcgagtagctgggactacaggcgtgcaccaccatgcccagctaatgtttgtatttttagtagagatggggtttcaccatgttggccaggttggcctccatctcttgacctcgtgatccacccacctcaccctcccaaagtgctgggattacaggcatgagccactgtgcccagcccccacgattcctatttttactgcctctgtcagagacttgtgtttcagctccactcttgtcatccctacccctgaatcaaatgtatttcccagctttcctatttaaaaaaaaaaaaaaatgctgtcattatctcttagcttggccagacctgtagtcatctttttccttctcccaccttccatttacttcagcaatatttatttattcaaatattaacagtgtttaacctcagttggtaattatgggtgatttttattatttttcttttagcttctctgggttttcaaatttatttacaagcatgtactgcttttttttgttattgacttttatttgtagaaaatttccaatatgtagaaaagcagagtagttacagtgatccctcatcgtccagcttcaacagttgtcaggtcactgccaatcataattgatgtctgatcccacctactctgccctaactgtgttatttgaagctggtcccagacaatatgttttcatctgtaaacacttataaaatgtaatttgtatcttcaaatgatgaggaaatgtttttatgaaacaaccacactaccattgtcagttttttaaatgttatcaaatatccagttaggttcaattctataattgtctcctattaaaaaaattatttattcaaattatgattctaagtccacaagttatatttagttgatatttctcttatgtgtcttaaaatttaggtccccccttcatcttttttctcctctcgcagcttatttgttgaagaaattggattgtttatcctgaagggcctatcacattctggattttgctgattgcatttccatagtgtctcttaacttgttcttctatcttttctgaaaactggtagttagatttagaagctaaacctaattggagttttattggttttctcaaaatacatactaaggatattatatacatcctattgcatcatatgtggaggtgtatagtgtttgattaagacggggcagtgaggtatatgatgaatgtaggtagcgattatcagtggcacctgacaatgtaatacctcttaagttaaaaacaaaacaggccgggcacagtggctcacgcctgtaatcccagcactttgggaagccaaggtgggtggatcacgaggtcaagagttcaagaccagcctggctggccaagatgatgaaaccccatctctactaaaaatacaaaaaaattagccaggcatgatggcaggtgcctataatcccagctacttgggaagctaaggcagagaattgcttgaacctgggaggtggaggttgcagtcagagctgagatcgcaccactgcactccagcctgggcgacacagggagactctgtctcaaaaaaaaaacaacaacaaaacaaaacaaaacaaaaaatagtaatcagtctgaccaaatccttagttctcattttcgtttctgcctttatcaccatttatttcctcccccaactcttaaaacaaccttttctttatttactgtgtttgatgaccctagactttccttgttccttcttacttcttcatagttgtctttgttttctcaactcttactcttctcactggttcatatgaaggtactgattttataagtggtaatttcttccttaagaacatagccacattcatggtttcaaactctaccatgttggcaactctcaaatctccatttgaaagcttaaacctcacccagggtctggattttgtcacattccaagttacaaacacagcagcacaaaatgttggtgagtctgtgccctgaacttctaaccaggctgatgctgtcatctggtggtcaccatgggaactagctgaccctactggctcttccctactccccttctttcttctttgtcaggggttaatgtactttctctgagcctagcccctccacctcagttcctttatcttctcctgatttagttaattccacccccggcagccctttatatttatggccccttacatataaccttccttctatcttgtccataacctgtggtttccctttcttccatctgcctgtcttccactttgtttcttgtatttgtgagcttttcaaaattcagtaatggttaagaggcatgcaaataagctagtgatgtgcctatatcaaggaaaagcaagggtgcgagtttggtcagaatcagtttataaagttcatgaagaacaaattaatactaagtccttttaaatgtacccagaaatctcctccagaatcttctgaaaagtttctattcctttcttaatctcttctaatcagagttggttttcttcttcaaccaaataccttcaaaatagaagctgtttcatgtcaatatggattttttcttttggtttacaaccagcagggaaagaaagagcacagtttatgtacttcttacctaaagaatctagcattccgttttttaaatcttaacagtcttacaaagtaagactttattcttgtataaaaggagaaacaggctccttgtcagtaacaggcaggccgtggattccaaccaggttagaatgactctaagcgtccatcttttactggattgtgctgtctcctaatgttgtaatgctttttttcttcatggcttaattaagcatgtggttttccagctacttctaggttaaattagattgtcgtggaccagtctagcttaggagcctagctagtgtctttaccattattcctatgagaaaacatgttttaaactcgtgttttggcttacagaggaaattttggaacccacgttcctcgttgtttgagtttagtcccagcttttccagttttgctcctgacatttcagttcctatttcagcttccccatgtgttagaggtatcactatttctgtttttctaagctagcaaccttggaatcataatcatcttgtcttgcgtctttgtgaactgtgtacacaatctgtcactaaagcttgtcatttcttgttgaaactcactttcagttttgtcccatactcttccattcccactgtggccacactggtctccggagacttctcacctccttgcttccctctctgttccttccttttttttaaccttctctccttccaggaacagccactgagcacccaacccgacccagagatttttctaggcacttaagagtgccagctctgataccaattatctgtgaagactcaaaaaagtcaccatctttgtctcttaaatgggattaattatacttgccttatctcaagaagaggggcttactctgaggaactaaaggatgtgtacataaaagtataaaacaaacaatgtagaagaaaatgtgaaggaaatacagacttaaggtggcattatattgcagtgtgtgactcaggattgagagtaaaaagtaataaccattgaacaaataaatcataaatggtctgcagcccaaccgaaatgttaattctgttttacagacaatggtacttggactcagctctggttggtgtcagattatcatgagcatggatccctttttgattacttaaacagatacacagttactgtggaaggaatgataaaacttgctctgtccacggcgagcggtcttgcccatcttcacatggagattgttggtacccaaggtaattctataagcagttctattatttaagctttaaattttcatgaataatgtctatgaaaatagaaggtggaggctgggcctggtggctcatgcctataatcccagcactttgggaggctgaggtgggcagatcgcccgatctcaggagttcatggccagcctgggcaacatgacaaaaccgcatctctaccaacatacaaaaaattagtcgggcatggtggcatgcacctgtagtcccagctactcagggggctgaggtaggaggattacctgagcctgggaggtcgaagctgcagtgagcagacatcatgccactgcactcccagctgagtaatagagagagaccctgtctcagaaaaaaaaacaaaaacaaaaacagtaggtggcctaactggagatatttaaaacaaattttttagatgagaacattttatctttcagttcaaaatttcaggtagagctaggaatctggaaatttgtttagagattctctagtcgttgtaacaaaactgtgattttttttgagttcttaaaagtagcattcaatcttatgatttttgaggatctcagtttcagaattcaggtccaactgaatatatttttatgtgtagtatcaaatgaaatgtgaaagtgctttgtaaacatcaacatgctaggtaactgttatctggccatctaataattatatttgaccttgagataaggagactgcatgagatagttttacagttgaaaaattaaatactaagttttagttatgacatttgtatgctgtagtttttgtgcatgtgggatttcagatgccagtatatctctctgctctagcagttgtccacttgcaacccaatggctcccccactccccactttacatacagcataagtgctagttcacatcttagctccatctttgtagttattattattattgattgtaacagttttattgagttataattcacatcataaagttcacccacttaaagtgtaaaattcagtggtttttagaatactcagagttgtacagccagcaaacactacagtcaattttagaatatcttcactccaaagagaaaccctgtagccactagcagtcactcccctttcctcccaaactccttagccctaggcaacaactgctcctttttgtctgtagatttgcttattctgcacattttatataaatgaatcatacaatatgtggtcttttgtgactggcttctttcacttagcatgttttcaaggttcatttatgttgtagcacgtatgagtacttcagtcattttgatggctaagtaatacttcagtgtatggatatggcatatgtcatatatccgttcgttgatggacatttggtttgtttcttttggccattgtagctaatgctgcagtgaacatttgtgtacaagttgtatgtagtttcatgttttcagttatcttgggtatatacctaggagttgaattactgtatcatatgataactctatttaatggtttgaagaactgccatactattttcttaaagtgcctgaaccattttacattcctgccagcagtgtatgaaggttccaggttttccacattataattattattttttaataacattttctagtggttagcatcaaagataatatacttaatactgagtacattgcagttgatagggaagtgatgttctacatgcttggttcctgggctgctggaatatcagtctatggctaagtttcttaaaaagaattcataaggcaccaacagataaactgataactttttttttgccccagtctttgagttgttcatcttttaaagcatgttattgtccacattttctttaaagaaatataaattcagtgacttttggtgtagtgattcacttgagtttaataatgccgtaagtattgtaggtcatgtgggctgaaatgctttgataatttgggttgggagaagagacttttgaacctaaagatgtgagttgtgattggtattaccttttaagcagtcatgtttaatttttgattctttaggaaagccagccattgctcatagagatttgaaatcaaagaatatcttggtaaagaagaatggaacttgctgtattgcagacttaggactggcagtaagacatgattcagccacagataccattgatattgctccaaaccacagagtgggaacaaaaaggtatacttttgaacaactatatttaatatcttctgaaatcaccttttttcccttctctttcatatatacatatcattgctgaaactcagcttaaacttgcactttattagattgccaacaggtaagaagatctcatggtcttgcctgctctgaagccagagttacctgacttaaaaagatgcctgctgatgaaaggttgcccttccagaaaatatcattaggcatgttaattataataacagtagtaactaacgtttatagggcacctactatgtgccaatcgtctaataggtcttttacgtatattacctcatttaatcccttctcaaatactgtgcagtagctagccctgctattttcatatttcagttcctaaaaatatgcctttcttgctttcttagaacttttgcacatgctgtctcctggagcatactttaccctactgtttctcagcctcatacccacctttcccgtaggaagttttttctagtcctcaaaaatcttaggagtccctgccagggactgtcatagcacactgaactgggaccgttgaggcacttatgcgttatgttgtaactgtttatttatttgcctatatattctattaggtgcaagctgcttgagagcagccttgtattcccagcatccatcacagtgcctaatacatggtagatcctcagtagatatttgttgagtccatgagtcttcaaaagaacttaattaggtaggtgttattaccctttaattcacagatgaggaaaccaccttgaggaggttaaataatatggccagcttcatgtggatgataagccgaagagctgagatttgaacctgggcatttctgacccaaaccccttatcacaagctgtcacagcattttttcaaactactgtcttggccttggagacagctggagagccagcagcattagtctattcaaattgcatgtataattttgagatttctggattccctggggactctcaattttcccatccaagtactaagcaggcccgaccctgcttagcttccaagatcagacgagatcgggcgtgtttagggtggtatggccgtagatgactctcaattctcaaccagctaaggggtccttgtcagtggttgctgtaggtctctgtgggtcctgacccataattttggtaggtttttgaagcttcagtatgaggactggcattcttttgtatctattatttttttccctggagtatattcgtgcccttcctttcatcctcagtgagaagacttctaaattaaaatgcatggtttctacctagtacgtgtataggtggtgtacattaggacacctttaacagtcacaattgttatgtatgtctttcattggaaaccaagatcatgaggcagatagtgtgaaactgctattttagcattttgtgggatttagttgacatcattaatgtgcaaaccagtgtggatatttaatatttttcttgagtctaatatttgttatgtaatattgtgtacatatgtctatgtataaagaaatgtctgaaaggaggttcatccaaatatggcagtaaggggatgattttcaaagttctttttgcaaattttttttaggtacatggcccctgaagttctcgatgattccataaatatgaaacattttgaatccttcaaacgtgctgacatctatgcaatgggcttagtattctgggaaattgctcgacgatgttccattggtggtaaattgctctcctctcccccagtagtttgtcatgagcagaagttgttcaagaattgtcttctttttttaattgaatgaaattatgtacagtccattatctgaaacaggatgtcaccgagtgccagagaaaacaaaggcgatgaaacctttgggaggggacagtgccatggtgtgcacatgcacagctctagcctagtgtattctcttcctgtttccatttgaatctggagactcatcagaacccaaccccttgttatattggaatatagttctttagaatggacagctgcttgagaggctcacctaggaagctgtttctagcatgtacctgggtgtcaaacttattttttttctttgagattgtggttattttctccaacttgatagttacagttacatacacagaatacaattatgttaccattgtgttgtattctagagttagtttgttttaacttctagctttttagatggagtacttttaatgtttactcaggaaacagtctcttaggcttggggacctagacttggctgagacctagtgccttaggtttttgaagcagtgagggacagagtatttctctgtattgtagtaaataggatatattattgacagatgcaagtagagaaagggacttggcaccttaaacttgcctcataagattcaagtctcactgatagggtatatatatccctgtgcaagtgagagcctgtgcacttacagaatagaatctcatttgctgcacaatagggttctaggggaaaatgtcaatctggtcatcacagctcatagtttactgtcatttcaaataggctttattgatctcatggcaatacttagtttcaaggtgtgggtggaatatcaactcagggaagtggcttgtggatacagatgtggatgagatagagaaagctgtaatctctgttccacatacctactttagtaatgaaacactgtaataggtctctcaggtgatcttttaatgccttggcattagctgaataaattcatcaaaatttaattttttttaaactgatacaggaattcatgaagattaccaactgccttattatgatcttgtaccttctgacccatcagttgaagaaatgagaaaagttgtttgtgaacagaagttaaggccaaatatcccaaacagatggcagagctgtgaagtgagtatttctttttgatattaggcaattttctaaactgcttctgcttagtaagcaaaagtttgctacttttctttaaggaaaacttttctttaagaattttctttttcatagcagtcaaaccaatgtttaaaaacagaataatttggttttcatattcaattgtaagcacattgaaagggccatggaacatttgcagtggcctttagtgtatcagaacatagtttagatctgccgggcgaactaaggcacatatttttaaatgaatgcctcccttcagccggggcaacccagaacactagacagttaccggacatgaatgaggagccctgtattctagaccagcctggctaccatttcaagggtctgactctgaacaaatccctttagttctctggactttaatatccctttgcaaggtgaggaactcagataaggtgattacaaaggtgtttcaaatgattttccgttttattcatctgattgcccagataaccgttaaccaggaatttagggaaaatgcttttttccagcagtatctgagctgctcaacttcagctctaacaaaaagttttagaaacgtttttgtaattgtaaatttaaagattcgtaagatgaattttatttaacctctccttaattgctagctgttactattacaatattggtgaagcagagcatattcctccaggtttgaagatttgtagcttaaaaaggctataaaaagctgttcagttcagtagttgattttacgtcttaaactattgtaggactcagcagaacctctgataagcaagagagcttgctacctccaacaaaatcacatctccaggcccaaataaataaaatgtatttcagcatgcttaaggaatttgcatgtgacatagtttaataaatgagagtgctgctagattttgtcttttagaaatttgatctacttgggaggctgaagtgggaggattgctggagcctgggaggtcaaggctgcagtgagctgagggcatgccattgcattccactttgggcggcagagtgagaccctgtctcaaaaaaaaaaaaaagaaagaaaaatttgatgtgaatacttcaaagtacaaacttaaaatttcagtgtgaggtcagatttcttctttgctttgcccagctctggtttaggattcggccttttcaggtttgctaaatgagtcactctttgtccacctgctttccagcactggcaccagtaccctattgatggaaatttatgtaatttctactcatttgctattacaaataatgcttaaacaataacaagtgtatatgtcatttaaaaagaaaatttacacgtaaaaattcttatccagaccaatggaaaatggtgcatgcattaatttttttttttatattttcttgtaggccttgagagtaatggctaaaattatgagagaatgttggtatgccaatggagcagctaggcttacagcattgcggattaagaaaacattatcgcaactcagtcaacaggaaggcatcaaaatgtaattctacagctttgcctgaactctccttttttcttcagatctgctcctgggttttaatttgggaggtcaattgttctacctcactgagagggaacagaaggatattgcttccttttgcagcagtgtaataaagtcaattaaaaacttcccaggatttctttggacccaggaaacagccatgtgggtcctttctgtgcactatgaacgcttctttcccaggacagaaaatgtgtagtctacctttattttttattaacaaaacttgttttttaaaaagatgattgctggtcttaactttaggtaactctgctgtgctggagatcatctttaagggcaaaggagttggattgctgaattacaatgaaacatgtcttattactaaagaaagtgatttactcctggttagtacattctcagaggattctgaaccactagagtttccttgattcagactttgaatgtactgttctatagtttttcaggatcttaaaactaacacttataaaactcttatcttgagtctaaaaatgacctcatatagtagtgaggaacataattcatgcaattgtattttgtatactattattgttctttcacttattcagaacattacatgccttcaaaatgggattgtactataccagtaagtgccacttctgtgtctttctaatggaaatgagtagaattgctgaaagtctctatgttaaaacctatagtgtttgaattcaaaaagcttatttatctgggtaacccaaactttttctgttttgtttttggaagggtttttgtggtatgtcatttggtattctattctgaaaatgcctttctcctaccaaaatgtgcttaagccactaaagaaatgaagtggcattaattagtaaattattagcatggtcatgtttgaatattctcacatcaagcttttgcattttaattgtgttgtctaagtatacttttaaaaaatcaagtggcactctagatgcttatagtactttaatatttgtagcatacagactaatttttctaaaagggaaagtctgtctagctgcttgtgaaaagttatgtggtattctgtaagccatttttttctttatctgttcaaagacttattttttaagacatgaattacatttaaaattagaatatggttaatattaaataataggcctttttctaggaaggcgaaggtagttaataatttgaatagataacagatgtgcaagaaagtcacatttgttatgtatgtaggagtaaacgttcggtggatcctctgtctttgtaactgaggttagagctagtgtggttttgaggtctcactacactttgaggaaggcagcttttaattcagtgtttccttatgtgtgcgtacattgcaactgcttacatgtaatttatgtaatgcattcagtgcacccttgttacttgggagaggtggtagctaaagaacattctgagtataggtttttctccatttacagatgtctttggtcaaatattgaaagcaaacttgtcatggtcttcttacattaagttgaaactagcttataataactggtttttacttccaatgctatgaagtctctgcagggcttttacagttttcgaagtccttttatcactgtgatcttattctgaggggagaaaaaactatcatagctctgaggcaagacttcgactttatagtgctatcagttccccgatacagggtcagagtaacccatacagtattttggtcaggaagagaaagtggccatttacactgaatgagttgcattctgataatgtcttatctcttatacgtagaataaatttgaaagactatttgatcttaaaaccaaagtaattttagaatgagtgacatattacataggaatttagtgtcaatttcatgtgtttaaaaacatcatgggaaaaatgcttagaggttactattttgactacaaagttgagtttttttctgtagttaccataatttcattgaagcaaatgaatgagtttgagaggtttgtttttatagttgtgttgtattacttgtttaataataatctctaattctgtgatcaggtactttttttgtgggggttttttttttgtttttttttttttgttgttgtttttgggccatttctaagcctaccagatctgctttatgaaatccaggggaccaatgcattttatcactaaaactatttttatataattttaagaatataccaaaagttgtctgatttaaagttgtaatacatgatttctcactttcatgtaaggttatccacttttgctgaagatattttttattgaatcaaagattgagttacaattatacttttcttacctaagtggataaaatgtacttttgatgaatcagggaatttttttaaagttggagtttagttctaaattgactttacgtattactgcagttaattccttttttggctagggatggtttgataaaccacaattggctgatattgaaaatgaaagaaacttaaaaggtgggatggatcatgattactgtcgataactgcagataaatttgattagagtaataattttgtcatttaaaaacacagttgtttatactgcccatcctaggatgctcaccttccaagattcaacgtggctaaaacatcttctggtaaattgtgcgtccatattcattttgtcagtagccaggagaaatggggatgggggaaatacgacttagtgaggcatagacatccctggtccatcctttctgtctccagctgtttcttggaacctgctctcctgcttgctggtccctgacgcagagaccgttgcctcccccacagccgtttgactgaaggctgctctggagacctagagtaaaacggctgatggaagttgtgggacccacttccatttccttcagtcattagaggtggaagggaggggtctccaagtttggagattgagcagatgaggcttgggatgcccctgctttgacttcagccatggatgaggagtgggatggcagcaaggtggctcctgtggcagtggagttgtgccagaaacagtggccagttgtatcgcctataagacagggtaaggtctgaagagctgagcctgtaattctgctgtaataatgatagtgctcaagaagtgccttgagttggtgtacagtgccatggccatcaagaatcccagatttcaggttttattacaaaatgtaagtggtcacttggcgattttgtagtacatgcatgagttaccttttttctctatgtctgagaactgtcagattaaaacaagatggcaaagagatcgttagagtgcacaacaaaatcactatcccattagacacatcatcaaaagcttatttttattcttgcactggaagaatcgtaagtcaactgtttcttgaccatggcagtgttctggctccaaatggtagtgattccaaataatggttctgttaacactttggcagaaaatgccagctcagatattttgagatactaaggattatctttggacatgtactgcagcttcttgtctctgttttggattactggaatacccatgggccctctcaagagtgctggacttctaggacattaagatgattgtcagtacattaaacttttcaatcccattatgcaatcttgtttgtaaatgtaaacttctaaaaatatggttaataacattcaacctgtttattacaacttaaaaggaacttcagtgaatttgtttttattttttaacaagatttgtgaactgaatatcatgaaccatgttttgatacccctttttcacgttgtgccaacggaatagggtgtttgatatttcttcatatgttaaggagatgcttcaaaatgtcaattgctttaaacttaaattacctctcaagagaccaaggtacatttacctcattgtgtatataatgtttaatatttgtcagagcattctccaggtttgcagttttatttctataaagtatgggtattatgttgctcagttactcaaatggtactgtattgtttatatttgtaccccaaataacatcgtctgtactttctgttttctgtattgtatttgtgcaggattctttaggctttatcagtgtaatctctgccttttaagatatgtacagaaaatgtccatataaatttccattgaagtcgaatgatactgagaagcctgtaaagaggagaaaaaaacataagctgtgtttccccataagtttttttaaattgtatattgtatttgtagtaatattccaaaagaatgtaaataggaaatagaagagtgatgcttatgttaagtcctaacactacagtagaagaatggaagcagtgcaaataaattacatttttcccaagtgccagtggcatattttaaaataaagtgtatacgttggaatgagtcatgccatatgtagttgctgtagatggcaactagaacctttgagttacaagagtctttagaagttttctaaccctgcctagtgcaagttacaatattatagcgtgttcggggagtgccctcctgtctgcaggtgtgtctctgtgcctgggggcttttctccacatgcttaggggtgtgggtcttccattggggcatgatggacctgtctacaggtgatctctgttgcctttgggtcagcacatttgttagtctcctgggggtgaaaacttggcttacaagagaactggaaaaatgatgagatgtggtccccaaacccttgattgactctggggaggggctttgtgaataggattgctctcacattaaagatagttacttcaatttgaaggctggatttagggatttttttttttccttataacaaagacatcaccaggatatgaagcttttgttgaaagttggaaaaaaagtgaaattaaagacattcccagacaaatactaagacaatttgttgcctatggacgtctgccttacaagaaatactaaatccttcacacagaaaataaatgacaccagatggtaacctgaatccacaggatgaaatgaagagcaccagaaatggtggatatatgtacaactagcaaagactgtatgattgtatagctgccataaattactacaaatgccctggcttaaagcaacacctatttatgatctcagaattccataattcagaagtctaggcatagctcagatggttctctgctccatattttaaaaggtcaaaatgaaggcattggctgggcaacattcttttctggaggctcggatgaataggcttccaagctcattgaggttgttggcagaattcagctccatatggttgtaagacaggttggccaggggtggttgtcagtttctagaagccactcaaattctttggctcgtggttccctcctccatcatcaaaaccagcagcaatgggttgaatcatccttgcacttttctcggatctccccttctgcctcatctctccactgtctcttccactgcatctctctaatgcttctgcttccctcttctgcttttaaggggccatgtgattactcagggggccatctggataatccaggataattaccctatttagtaacctcagttttacctgcaaagtgcattcactgcagtaccaagattagtatttgattaaataactagagaatgggaatcttggggaaataatttgcctaccaaaataaatgtaagttatctttcagtagcataagactatatagtaattacatcaccatactgttgggtttacaatataggtgcagtgtatattaataacaaaggagtgggtaggaaatggaactctattgggacaaagatgtatcttattagaattaattagtcctaatttgaagatgattgtaataaattgaaatgcatgctgtagagcctggagtaaccactgaagcatcaatttaaaaataaattaaaaaaaacaaaatggtacaccaagaaatatttaacacaaaaggcagaaagaaagaagcaaaatgatagacatttggaaaacaaatagcaaaatggcagccataagtaatcatgccaataatttcattaaatgtgaatggactaaatagttaaaaggtagagatggtcaggatggatttaaaaagaaaaaactatatggtgttcacagaggcacactgtagattcaaagaccaatagctgtaaagtgaaagtatggaaaaatataacatgcaaacagtaatcgtaagagagctggaatgtctatatcagtacagtgg

SEQ ID NO: 102 - DNA, 6475 bp, Homo sapiens
ggcgaggcgaggtttgctggggtgaggcagcggcgcggccgggccgggccgggccacaggcggtggcggcgggaccatggaggcggcggtcgctgctccgcgtccccggctgctcctcctcgtgctggcggcggcggcggcggcggcggcggcgctgctcccgggggcgacggcgttacagtgtttctgccacctctgtacaaaagacaattttacttgtgtgacagatgggctctgctttgtctctgtcacagagaccacagacaaagttatacacaacagcatgtgtatagctgaaattgacttaattcctcgagataggccgtttgtatgtgcaccctcttcaaaaactgggtctgtgactacaacatattgctgcaatcaggaccattgcaataaaatagaacttccaactactgtaaagtcatcacctggccttggtcctgtggaactggcagctgtcattgctggaccagtgtgcttcgtctgcatctcactcatgttgatggtctatatctgccacaaccgcactgtcattcaccatcgagtgccaaatgaagaggacccttcattagatcgcccttttatttcagagggtactacgttgaaagacttaatttatgatatgacaacgtcaggttctggctcaggtttaccattgcttgttcagagaacaattgcgagaactattgtgttacaagaaagcattggcaaaggtcgatttggagaagtttggagaggaaagtggcggggagaagaagttgctgttaagatattctcctctagagaagaacgttcgtggttccgtgaggcagagatttatcaaactgtaatgttacgtcatgaaaacatcctgggatttatagcagcagacaataaagacaatggtacttggactcagctctggttggtgtcagattatcatgagcatggatccctttttgattacttaaacagatacacagttactgtggaaggaatgataaaacttgctctgtccacggcgagcggtcttgcccatcttcacatggagattgttggtacccaaggaaagccagccattgctcatagagatttgaaatcaaagaatatcttggtaaagaagaatggaacttgctgtattgcagacttaggactggcagtaagacatgattcagccacagataccattgatattgctccaaaccacagagtgggaacaaaaaggtacatggcccctgaagttctcgatgattccataaatatgaaacattttgaatccttcaaacgtgctgacatctatgcaatgggcttagtattctgggaaattgctcgacgatgttccattggtggaattcatgaagattaccaactgccttattatgatcttgtaccttctgacccatcagttgaagaaatgagaaaagttgtttgtgaacagaagttaaggccaaatatcccaaacagatggcagagctgtgaagccttgagagtaatggctaaaattatgagagaatgttggtatgccaatggagcagctaggcttacagcattgcggattaagaaaacattatcgcaactcagtcaacaggaaggcatcaaaatgtaattctacagctttgcctgaactctccttttttcttcagatctgctcctgggttttaatttgggaggtcaattgttctacctcactgagagggaacagaaggatattgcttccttttgcagcagtgtaataaagtcaattaaaaacttcccaggatttctttggacccaggaaacagccatgtgggtcctttctgtgcactatgaacgcttctttcccaggacagaaaatgtgtagtctacctttattttttattaacaaaacttgttttttaaaaagatgattgctggtcttaactttaggtaactctgctgtgctggagatcatctttaagggcaaaggagttggattgctgaattacaatgaaacatgtcttattactaaagaaagtgatttactcctggttagtacattctcagaggattctgaaccactagagtttccttgattcagactttgaatgtactgttctatagtttttcaggatcttaaaactaacacttataaaactcttatcttgagtctaaaaatgacctcatatagtagtgaggaacataattcatgcaattgtattttgtatactattattgttctttcacttattcagaacattacatgccttcaaaatgggattgtactataccagtaagtgccacttctgtgtctttctaatggaaatgagtagaattgctgaaagtctctatgttaaaacctatagtgtttgaattcaaaaagcttatttatctgggtaacccaaactttttctgttttgtttttggaagggtttttgtggtatgtcatttggtattctattctgaaaatgcctttctcctaccaaaatgtgcttaagccactaaagaaatgaagtggcattaattagtaaattattagcatggtcatgtttgaatattctcacatcaagcttttgcattttaattgtgttgtctaagtatacttttaaaaaatcaagtggcactctagatgcttatagtactttaatatttgtagcatacagactaatttttctaaaagggaaagtctgtctagctgcttgtgaaaagttatgtggtattctgtaagccatttttttctttatctgttcaaagacttattttttaagacatgaattacatttaaaattagaatatggttaatattaaataataggcctttttctaggaaggcgaaggtagttaataatttgaatagataacagatgtgcaagaaagtcacatttgttatgtatgtaggagtaaacgttcggtggatcctctgtctttgtaactgaggttagagctagtgtggttttgaggtctcactacactttgaggaaggcagcttttaattcagtgtttccttatgtgtgcgtacattgcaactgcttacatgtaatttatgtaatgcattcagtgcacccttgttacttgggagaggtggtagctaaagaacattctgagtataggtttttctccatttacagatgtctttggtcaaatattgaaagcaaacttgtcatggtcttcttacattaagttgaaactagcttataataactggtttttacttccaatgctatgaagtctctgcagggcttttacagttttcgaagtccttttatcactgtgatcttattctgaggggagaaaaaactatcatagctctgaggcaagacttcgactttatagtgctatcagttccccgatacagggtcagagtaacccatacagtattttggtcaggaagagaaagtggccatttacactgaatgagttgcattctgataatgtcttatctcttatacgtagaataaatttgaaagactatttgatcttaaaaccaaagtaattttagaatgagtgacatattacataggaatttagtgtcaatttcatgtgtttaaaaacatcatgggaaaaatgcttagaggttactattttgactacaaagttgagtttttttctgtagttaccataatttcattgaagcaaatgaatgagtttgagaggtttgtttttatagttgtgttgtattacttgtttaataataatctctaattctgtgatcaggtactttttttgtgggggttttttttttgtttttttttttttgttgttgtttttgggccatttctaagcctaccagatctgctttatgaaatccaggggaccaatgcattttatcactaaaactatttttatataattttaagaatataccaaaagttgtctgatttaaagttgtaatacatgatttctcactttcatgtaaggttatccacttttgctgaagatattttttattgaatcaaagattgagttacaattatacttttcttacctaagtggataaaatgtacttttgatgaatcagggaatttttttaaagttggagtttagttctaaattgactttacgtattactgcagttaattccttttttggctagggatggtttgataaaccacaattggctgatattgaaaatgaaagaaacttaaaaggtgggatggatcatgattactgtcgataactgcagataaatttgattagagtaataattttgtcatttaaaaacacagttgtttatactgcccatcctaggatgctcaccttccaagattcaacgtggctaaaacatcttctggtaaattgtgcgtccatattcattttgtcagtagccaggagaaatggggatgggggaaatacgacttagtgaggcatagacatccctggtccatcctttctgtctccagctgtttcttggaacctgctctcctgcttgctggtccctgacgcagagaccgttgcctcccccacagccgtttgactgaaggctgctctggagacctagagtaaaacggctgatggaagttgtgggacccacttccatttccttcagtcattagaggtggaagggaggggtctccaagtttggagattgagcagatgaggcttgggatgcccctgctttgacttcagccatggatgaggagtgggatggcagcaaggtggctcctgtggcagtggagttgtgccagaaacagtggccagttgtatcgcctataagacagggtaaggtctgaagagctgagcctgtaattctgctgtaataatgatagtgctcaagaagtgccttgagttggtgtacagtgccatggccatcaagaatcccagatttcaggttttattacaaaatgtaagtggtcacttggcgattttgtagtacatgcatgagttaccttttttctctatgtctgagaactgtcagattaaaacaagatggcaaagagatcgttagagtgcacaacaaaatcactatcccattagacacatcatcaaaagcttatttttattcttgcactggaagaatcgtaagtcaactgtttcttgaccatggcagtgttctggctccaaatggtagtgattccaaataatggttctgttaacactttggcagaaaatgccagctcagatattttgagatactaaggattatctttggacatgtactgcagcttcttgtctctgttttggattactggaatacccatgggccctctcaagagtgctggacttctaggacattaagatgattgtcagtacattaaacttttcaatcccattatgcaatcttgtttgtaaatgtaaacttctaaaaatatggttaataacattcaacctgtttattacaacttaaaaggaacttcagtgaatttgtttttattttttaacaagatttgtgaactgaatatcatgaaccatgttttgatacccctttttcacgttgtgccaacggaatagggtgtttgatatttcttcatatgttaaggagatgcttcaaaatgtcaattgctttaaacttaaattacctctcaagagaccaaggtacatttacctcattgtgtatataatgtttaatatttgtcagagcattctccaggtttgcagttttatttctataaagtatgggtattatgttgctcagttactcaaatggtactgtattgtttatatttgtaccccaaataacatcgtctgtactttctgttttctgtattgtatttgtgcaggattctttaggctttatcagtgtaatctctgccttttaagatatgtacagaaaatgtccatataaatttccattgaagtcgaatgatactgagaagcctgtaaagaggagaaaaaaacataagctgtgtttccccataagtttttttaaattgtatattgtatttgtagtaatattccaaaagaatgtaaataggaaatagaagagtgatgcttatgttaagtcctaacactacagtagaagaatggaagcagtgcaaataaattacatttttcccaagtgccagtggcatattttaaaataaagtgtatacgttggaatgagtcatgccatatgtagttgctgtagatggcaactagaacctttgagttacaagagtctttagaagttttctaaccctgcctagtgcaagttacaatattatagcgtgttcggggagtgccctcctgtctgcaggtgtgtctctgtgcctgggggcttttctccacatgcttaggggtgtgggtcttccattggggcatgatggacctgtctacaggtgatctctgttgcctttgggtcagcacatttgttagtctcctgggggtgaaaacttggcttacaagagaactggaaaaatgatgagatgtggtccccaaacccttgattgactctggggaggggctttgtgaataggattgctctcacattaaagatagttacttcaatttgaaggctggatttagggatttttttttttccttataacaaagacatcaccaggatatgaagcttttgttgaaagttggaaaaaaagtgaaattaaagacattcccagacaaa

SEQ ID NO: 103 - DNA, 129000 bp, Homo sapiens
aagatgacatttattatagtatgtatagtacgtagttggcgtttttttcccccctgaggcaaggtctttctctgtcacccaggctggagtgtagtggcatgctcatggctcacagcaaccttgccttcctgggctcaagtgatcctcctacctcagcctcctgagtagctgggactacaggcgcatataaccacgcttggctaattttttattttttgtagagatggggggtctcactatagttcccaggttggtcttgaactcctgggctcaagtgatcctcctgcctcagcctcccaaagtgctgggattacaggtgtgagccactgtgcccagcctgtagtttttacatcctaatgatcaagaccctttaggtctcaccagactatcatgaggtcctttattacctctcctgattagtaaaagtcaggcttactcattcatagacttaaacccttggttgccacagcttctgtaaagcttggacactgaaacaagatagacgtaatcagtctcagagaatagctaactcagtgaagtgggcttaggggtttacagtgtttgagaatggctggcattatttcttaggctactgcctggaggtggtaaatgctgaattataattttaatggagagatgaggatgtagtttgatctaggatgttgtttgcaatcacatgaacaaagaccaagcaagcaatggaaaaatgaagacaactgagaggtaggctagggcgagtaaaggagcaggataaagagaaaaaaaaagcaaataaagttcagagctgcagttgtattttaaaggctgtctgcagagcaagagaaagccattggaatgacatgataatcagaatcctacgtccaggcaacaaaacactacccatcctgccacctataaacccagatagttgctctgatctaacaattcagtccatcacagcttagtacagactgcaaactccacctccatccagcctttcctaaccttcctaacttcccatcttctctgatctccaaataacgcagacctccttctgtctctctacagactccctaatatgcaaatacccatccccatttattaacccccatatccctctccttagccctttaattggatttcagtactttccaagtctacttcatcccataccctctgacctactgaaatacttttactccttaatcttctcctcctttcaaatatcctgattccgattcctctgcaaagtctccagccatttttctttccaaagccaattcccccattctgtgctgcccacccacctctgcctcccattcttctttatcccattctgattgccaattttcccacaaattctatcccagttccctaacacagtaatagtctcccccatttctctatggttctttcctgtgcccagactcaacatttctctatccatccagacttcccaagctgctcatctctcttcaccccagaaaataccctgacatcctaatgcgttccaatactctgacctccaattactcccctccctaaacaaaatactcaaacctccatccattcctcttcatcccaacccaactgcctgcctatttgcctttccatcctaatactctagcccccgtatccttctccatcctattaaaagcctgaatcccctctcccatctctcttcttctgctcagataccctaaaactcaagcttcccatctctttccattaattattcaattttattgagcaacttttatgtaggaagaaccatgctagaatctaagctcaagatgcagaagattttatctccctattacccatgatctctgcaccaagcagtctccttcatagcattttataaccattatttgtgaaactacttggttgttgcctgtttctccttctagactataagctacaagagagcagaggttttgtctgttgttctataaacaataaatatttgttgactgaaggactgtactaaacacttagacaataccaaatttaaatcctcaaagatttagctgtataggatcagaattattaacctgatttacaaatggcaatgtacctgaacagttaaaagcttggattctggaacgaaacagcctgagttcaaattctgattttccacttactgtgtgatcttaggcaaattacttaacctctctggtcctcagtgctatcactttttaaatggggatgataacctcatacaagttattttaaattctaaatgaggttaatacgtgcaaagtgcttaaaactggatctgacaaatagtgaacacccaaaaatgattcgcaattatttggacaaatgaggaaacatgatcaggaaggctcagacacatatccagggtcacagacctggttaagttacacaaggtggcagaattgaggcttcaacccaagtttgtctggcttcaaaattctctagtcccttaacgaatataacggaagtgtttgttcttccccttcttttagcatttcgtccccatatcctgtcatctttctccacgcactgtactccgtccgataccgtgacaacccgtcaggacgcccaaactgtcctttctcccgctcactccccacagacagctggcacatcccagctctcccctcagctcaggtggcaggacccacaaccttctgggcgccgcaccctaacttccacacctccccacactctggttcttcatccccaatcgcccccgccgtccccacctcttcccatccaaacctccctccttcatccaccgccccacgcccgttccgggccctcccctctttcccgtccaatcccaattcccagacacgcgcccccgccccgaatccatcccaagccggcccacaccacgcccggtccgggccttcccgcctttgccgccggcccccactgctcgggccggatgccggggaacgggctcggccaggtctgacgctcaccgcctagaagccgagccgagcagtcccgcaggctgaggtagagcgggagaagttcgggctctttcctcaggggcccagcggcgcggcagccattttgttgtgttgtgccggttgccgaggggccgcgcgcgcgtggtcggggctagtctcagccacgcccctctccctctccggtactgttggaagggacgcggaggcgtttcccgcctcttttgcagccagcgcgctaggatgccggggagtcttgggcgcgaggcttccggccgcgcggggccgacgggatgcggtgccttcgccttcggattgcgttgcaggtgaagtgtcgggtgcagagtcagggggagccgaggtttcatgcggcagctgcccgcagtgctgtggccttcgctgagacaaagctgccgccgccaccctctgaaacacggacacgcttctcagggcctgtgtccgaggacggcctgaggcaccggcgcagcgcctccccggcctcccccacttctgatgcttgcgcgctatgagcgagtgttcttatcagcacacttctctctgacagtcgtatctaaagcgaattccctccagggaccgaactgcccaggctcggatgaacctcaaagcggacgcagcctgggctccagctgtcgcgtgaggttcagggagcttgggaatcctaggcagaggatgttcctctgattgctacaagggagttaaagcaagaagcacttgcacaggcttcatctggggcttgcccatgagcacggcgttcacgacatgcattcaacagatattttaaagaatttagcagatactgggctggatgctagggaaacactgaagttttttttaaagtgttatcaccattgacgcctttcactccagtagcctcccgttttgaaggtataccctggaccatgttaccatcagaggctgcacccgctccagaaatccccagtgcaatcgctccccatccttgactataatcctatcatcttagcagcgtgcctgctcaaaagacccctatgccagcgtatttctaaacttccttgcgtcttccagtcccttgttcttaccattttctcgcgatcattctatcctgtcttcatttcctttcttcactacagagtttataggccacctgtataacacttttagaaactccctctctctctgtgtctcagtttccttatctatgaaatgaggtccttttacctattaacacttcctacagttttcctgataattataaaagtgaatcctggccgggcgctgtggctcatgcctgtaatcccagcactttgggagaccaaggtgggaggatcacttgaggtcaggaattcaagatcagcctggccaacaaggtgaaacgccgtctctactaaaaatacaaaaattacccgggcgtggtggcgcacgcttgtcatcccagctgcttgagaggctgcaggaggatcgcttgaacccgggaggcggaggttgcagtgagccgagatcgcgccactgcactccagcctggacgacagagcgagactccatctcaaaaaaaaaaaaaaaaaaaaaaagtccagttttcctgataattataaaagtgaatctctgtgaaagaacttagaacagtgagggacccatagtaagttctcaatatgtcttagatatttcattattagacaaaggttacccagaagcaatacttctttctacgcccaaaagaagagtttaggcaaggagtagggaggtggggaagaatttgcttggcaaagggaacaacttgtgcaaaccccggaagcgggggaaaagagcttggcaatgtgctgaatgttaagtaattcagtgtggctggaacaaaacatgagtatggaaacatgaagtagttcagtatggcttgtgcaaaaatctggggtggagaagctaaatctggaaaagggaccatattataagcagtattaggcacttcatttttccttaaggcagagatggcttcacctctataggaaattcaggggacgtccaacagggaataagctgcaataaacatggggatgcagatgtgtctttgatttactttgatttactgatttccttttccttttacttaaatgtgattcccattgacatttaagtgaatggtgctgtcctctccccaactatttacacgacacagaacgaagcccttggagtttaaacgcagaatttttgaaaagctccacttaagaggagattacattcattttttttcttttcttttttttttttttttttttaattttttgaacagagtctggctctgtcacccaggctggagtgcagtggcaggatctcggctcagtgcaacctccgcctcccgggttcaagcgattctcctgcctcagcctcccgaggagttgggattacaggcacgcaccaccaaggccagctaatttttgtattttagtagaaacagagtttcaccatgttggtcaggctggtctcaatctcctgacctcacgtgatccgcccgcctcggcctcccaaagtgctgggattacaggcgtgagccaccgcgccctgccgagattacattcatttttaatcgaagttcaggtgatatttattagattggaatgtgtacgttgctgagtttcagttctatttgcatatgttttgacacccatcgtttcggtttcttgtacccagaaacttagatttattgcgtaacctcattgctgtgtccctcaaagtctgtaatggtattcacgtgggatccattatcaagccgtggtgtgctgatgtagttcattatcaatcatattagtatcaattaatagccatcaaatatacataaaaagtccagagggtggcgcaaaacacttttctcttgggtgatctctcagtccgtatccagttagccgcggatgggcactcaccggtcccatgttgcccccttttcctcctcatacagacctctgctggtgtctagcatcatctctaacgaagctagagacttcaaaggagagacctttctccagttaatttgaatattaactgtctctcttagcatgctaaaagaacttccttctccaaagcagaagtgagaatacgaaagtaacgcagacaactcgcgttccacactatttttctttatctgatattatgaagaatgtactctgagttgcatttacaatacaaatattagccacgtcagggtgaccaagcttttactcagtcttttttccaaatgatagcaaagctattctgtttaaacttccctcagctttttgcaacccagtttaatcattttgcgaatttgttttagagaagaaacagactagtttgtcagacagggatggcaactttcattattgccatttctttctgtgactggccagtgtgattttgttgttttgttttttaagacaaggtctcactctgtcacccaggtttcagtgcagtgacacaatcataactcactgcagccttgacttctcagactcaagtgatcctcctccctcagcctcccaaatagctcagtctataggtgtgcaccaccacacctagctaatttttaaactttttgtaaagatggggtcttgctgtgttgcccaggctggtcttaaactcctgggctcaagcgatcctcccacctcaacctcccaaagtgctgggattacacgcatgagccagcatgcccagcctgatttttttttaatttttattcatttatttttttttgtttttgttggtgtgttttgttttttgttcttgtttttgtttttttgagacagagtctcactctgttgcccaggctggagtgcagtagcacgatcatggctcactgcaacctccacctccagggttcaaacaatttttgtgccttagcctccccagtagctgtgattacaggtgtgtgactccacgcccagctatttttgtgtatgtgtgtgtatttttagtacagacagtgcttcaccatgttgatcaggctggtcttcaactcctggcctcaagtatccgcttgccttggtcccccaaagtgctaggtttgtaggtgtgagtcaccatacccaaccttaatttttatttttaaatgacatgtagtaactgtacatatttatgggatacatagtgatgttttaatacatataaatgtatagtggttggagtaattagcatatccatcatcccaaacatcatatgtttattttaggaagatttcataccctccttctagctatttgaaactatataatatattattgttaactatcctcatcctatagtaagtatagaacactagaacttattgctcctatctagctataattttgtatcctttaagatatctttctctccttcccttccccctgctacccttcccaacctttagtatcctctgttctactgtttactcctatgagatcaacatttttcagcttcgacatatgactgagaacatgtggcatttaacttactgttcctggcttattcacgtaatatactgtcttccatttccatccgtgttgctgtgaattacagtatttcattcttttttatggctgaatagtattccattgtaagtatgtatgtatatatatatgaatacgcacacacacacatatatatacacatacagaatatacatatatatatacacatacagaatatacatacatatatatatatatatatatatatatatatatatatatatatcacccttccttccttccttctttctttctttcagaattttgttcttgttgcccaggctgcagtgcaatggcatgatctcagctcaccgcaacctctgcctcctaggttcaagcgattctcctgcctcagcctcccgagtagctgggattagaggcgcctgccaacatacccagctaattttgtatttttagtagagatggggtttctccatgttggtcaggctagtctcgaactcctgacctcaggtgatccacctgcctcggcctctcaaagtgctgggattacaggcatgagccactacgtctggcccacattttctttatccattcatctgttggacacctaggttgattccatgtcttggctattatgaatagtgctgcaataaacatggggatgcagacgtgtctttgatatactgatttcttttcctttggataaatgccaagtagtaggattgctggatcatatggtagttctatttgtagtttttttgaggaacttccacactgttctccatagtggatatattagtttacattccaccaacagtgtatgagtccctttttctggctgggcaaggtgactcacacctgtaatcccagcactttgggaggctgaggtgggaggatctcttcagcttaggagttcaataccagcctggagaagatagtgagacctcatctctactaaaaatcaaaaccattagctgggtgtgatggcacttgtctgtagtcctagctacttgggaggctgagtgggaggattgcttgagcctgggagattgaggctgcagtgagctatcatcatgccactgcaatgccgcctgggcaacagaaaccaaaaaaaaaaaaaagagtttctttttctccacatcctccccagcatttgttgtttgctgtcttgataatagccatcctaactggggtgagattatacctcatagtggttttgatttgcagatttgcatttccctgatgattgatgatggtgagcattttttcatatatttgttggtcatttgtatgtcttctttttgagaagtgtctattcagattatttgtccatttttatacaattttgttgttgagatgtttgagttccgtgtgtattccagatattaattccctgttatatgaatagtttgcaaatattttctcccattctctgggttgtttcttcactatgttgattgcttcctttgttgtgcagaagccttttagtttgatataatcccatatgtttatttttgtttttgttgcctgcatttttgaggtcttattcataaaatctttcctagaccagtgtccggaaccatttcccctatgttttcttctagtagttttatagtttctgtcttacatttaggtctttgatccattttgatttatatataaactcacgtacaaggtttttatatagggggagatgtagggatctagtttcattcttctgtatatggatatccagttttcccaggaccatttattaaagagactattctttccccagtgagtgttcttgacatctttgtcaaaaaaccagttggctgtagatccatggattaatttctgagtcctctatgctgtttcatttgtctggctatctgtttttatgacaatatcatgctattttggttactacagctttgtagtatattttgaagactgttagtgtgatgcctctagctttgttctttttgttcgggattgctttggccatttgggttcctttgtggttccataaaaattttgagatttttttcctatttctgtgaagaaaatcattggtattttgatagagattgcattgaatctgtagattgttttgagtagtatggtcattttaataatattgattcttctgatccatgaaaagtgagatgtctttccatttgtttgtaccctcttcaatttcttccatcagtgttttgtagttttccttgtagcagtcttttacatccatgcttaaaattattcctaggtgtttttttaatagctattgtaaatgagattgccttcttgatttcttttttagctcatttgttgtttgtgtatagaaacactactgatttttgtatgttggttttgtactctgcaactttactgaattcatttactagtttctaatatatttttgtggaatctttggggttttctacatatagaattatgtcatctgcaaatagaaataattttacctcttcctttctgatttttgatgtcttttatttctttttcttatctaattgcacttgctagttcttccaatctatgttgattagaagtggtaagtttgggatccttgcattgtaccagatcttagtggaaaagtttttaggttttttccattgatgataatgtgcgctgcaggcttctcataaatagcctttattatgttgtattagtccatttttaccctactataaagaactgagtaatttataaagtaattactgagactgagtaatttataaagaagagaggtttaattgactcacagtttcacatggctggggaggcctcaggaaacttaaaattatggtggaaggcaaaggggaagcaaggcacatcttttgaagcagcaggaggagaggggaagtgccacactattaaaccatcagctctcatgagaacttactccctatggtaagaacagcatggggaaactgcccccatgatccacccacctcccaccaggtaccttccctgacacgtggggattacagtttgacatgagatttgcgtagggacacagtgccaaaccataccatatgtttcaaatgttgaggaattttcctctttttttttttttttttagatggagcctcactctgtcaccaaccaagctgcgaatgcagtggcgcgatctcggctcactgcaatctccaccccccgagttcaagtgattctcctgcctcagcctcccaagtagctgggactatgggcacgcaccaccacgcccagctaattttttttgtatttttagtagagacagggtttcaccatgttcatcaggatggtctcaatctcttgacctcatgatccgcccaccttggcctctcaaagtgtgggaattacaggcgtgagccaccgcgccctgcctatttttttttttgagatggagttttactctatcacccaggctgaagtgcaatggtgcaattatggctcactgcagccctgaccttctgggaccaagcgattctcctgcctcaatctcctgagtaactgggactacaggtatgtgctaccatgcctggctaatttaaaaataattattgtcaagatggggtcttgcagcattgcccaggctggtctccaatttctggcctcaagtgatcctcccacctcagcctcccaaagtattgagattgcaggcatgagccatcatgcccagccaggaattttcattttatacccaaactgttgagactgtttattaataaaggatgttgaactttgtaagatgctttttctgtgtcagctgagatgatcatgtgtttttgttttttttttttttctttttttgagacagagtcttgttctgtcgcccaaggctggagtgagtgcagtagcgtaatctgggctcactgtaacctccacctcccaggtttaagcgattcttctgcttcagcctcctgagtagctgggattacaggcacgcaccacctcgcccggctaattttttttttgtatttttagtagagatggggtttcatcatgttggccagtctgatctcgaactcccgacctcaggtgatctgtccacctcagcctcccaaagtgctgggattacaggcatgacccaccacaactggcccaaagctatgttcgtaagtgcatgaaggctatgactgttgcaactttttagtaaataataattattctccacattaaatatttctctttgctcacttaaagttgtgagttctgtttacctaaagttattagttctctactagcttgaattttgtcagtacttgcctgacatatggttttcttttttttaattttcagtctttctatatcatttagtggtgatgtataccttttttttttttttttttttttaagatggagtctcgctctgtcgcccaggctggagtgcagtggcatgatctcggctcactgcaacctctgcctcccgggttcaagtgattcttctgcctcagcctcctgagtagctgggactacaggtgcacaccaccactcccggctaatttttgtattttagtagagatggggtttcgccatattggccaggctggtcttgaactcctaacctcatgatctgcctgcctcggcctcccaaaatgctgggattacaggcgtgagacaccgcgcccaacctgttgctgcatttttttttgttctttggctgtttcaaaaatgtctaacttttaatagaatattttaagcccattcaagtttgttgcatttgtacttattcctgttcttttacattttctattgaatatgttttcttacagtttctttacatccttttcagctttttgctgattatcttgggtatatccttcttctttacccttttattaaaaattatactagtttttattataaaagtaatgctgggctgggcgcagtggctcacacctgtaatctcagcactttggaagaccgaggtgggtggatcccttgagctcaggaggtccagaccagctaggaaaacatggcaaaatcctgtctttacaaaataaaaataaaaattagccaggtgtggtggcatgtgcctgtggtcccagttactctggaggctgagttgggagaatcgcttgagcgattcgaggctgcagtgagctgtgatcaaggagtttgaggctgcaatgagctgtgattgcactgctgcactccagcctgggtgacagcagaaagctgtctcaaaacaaaacaaaacaaaaaaagtaatgctgtatagaggaatgtgaagtataaggtaaaagcccttggccctgccacctaactgctttccaagatattgtcattgtttactatttttatatccttccagcaattttctccgcaattttctctacctataaaaatatattggctgtagatccatggattaatgtcctcctccctgactatccaaaatttataaactgaaaggaggaccagctttatcaagaatctttttgtcctctttgatggaatgttcctgtggggatttttcagtttatactaatttatactgggatgatttcagctaattctgatttctttagaatgtttttaaatttaaagctaaatttaactttatactttcatatatatatatatatatttttttagatggagtctcactctgtcacccaggctgcagtacagtggcacaatcttggcctactgcaacctctgcctcctggattcaagcgattctcctgcctcagcctcctgagtagctgggatatttattacaggcaccgccaccatgtctggctaatttttgtatttttagtagagacggggtttcaccatgtcagccaggctggtctcgaactcctgacctcagctgatccgccttcctcagcctcccaaatcctcagctgggattacaggcatgagctgctgtgcccagactattttatatttttgattccaaatttgtagtttgaattaagtttaactctatatgtttaaaatttaatttaattgacattcagctttagaagtcaaacttagaagatctgatattttaccaatgcttttgaatttaaattttaaaaatttaattgatagaaatacaaaattaaagttgataaattatttgaggaatttatgagagaatataaaaattgctaacatttgaaaaagtataaaatgacattcaaaatatcagattctatcacatatgaaaatctgcagcaataattctatcacagatgaaatactgaaatcttggggtctaataagaactatcaggaaatgtatttttgttaacagtttcaatatgaaagttaacaaaacactcaaagaaataaactaggaagcaacagaagctagtttatagttttctggagctataacaagtattgtttaaaacttacaacgaccctgttaggtggacagagtagacaatatctcctattctacaaatgaaaaaagtgaagttaacttaagattgaaaaacataaaatctcaaatacataaaatcatactcaattatatattacagagaaaagaaatggaaatgagaaatagagtaggaaaaggaaaaaagaataatttaaaaaaacaaaaaataaaaagaacaacaagaacaaagtgaataagtaaaatttaaaagaactgaaatggaagagatgggggtcataggtcaatgctggtgagattcatgagaagcagtgatataattcttcttacaaagaaatatctcaagattcattaatgggataatattccccattttccccagaataaccaccagttttaaaagttaactagattttggaaggcatttttgcatccttatctttttataattttcactggaataaatcactaactttttatcctgttaaatggggaccatcatatcttatttcatagggttaaagggttaccttcatggaaaagcattgcagtcctatgacctttctggatattgctgcaaacaatttttcaaaaacattttgcacattgccactacagcataaaaatagaagcatttctaaattaaggttcaaatctaacctacaggtcaaattttccaggttgctctattctattatttaattttaaattttttaaattccagttttaacaaaaaattacaagacaagcaaagatgcaggaaagtgtagcccatacaaggaaaagatataataaaaaccacctgaggaaatcttgatctcctagatatggactttacgtgagatattttcagtatgatcaaataactaaaagaaaccacatctaaagaactaaagagaagtgtaagagctacgtcttaccatacaaagaataagacgaaaattataaataagaaccaaatagaaattctgtatttgaaaactacaataactgaaataaaaaattcaatagggacactcaacagcagatttgagcagggagaaaaaaagaatcaatgaacttgaagatagatcaattgagattatccagtctgaggagcagaaagaaaaaaggattaagaaaaatgaacagacctgtagaccatctggtatgccatagaaaacacaaacatatacataaagacagacctttggtataccatcgagcataccaacatatgcatgaagagagttccagaaggagacgagagagagaggaaaggacagaaaaaaatatttgaagaactaatggtcaaaattttcaaatgtgatgagacacattaatccacacattcaagaaaactcaatgaactccaagtatgataaactcaaagagaaccacacctgactacatcataataaaactgtcaagtgtcaaagatgaagagataatcttgaaaataacaagagaaaagcaacacatgatagtacaaaggatcctcagtaaaattaacagctgatttctcatcagaaagcacagaggctactaagtagaaagatgatatattcaaagtgctgaaagaaaaagactgtcaaccaaaaattctgtaaataccatcactttggtgattaagattcaacataagaatttcaagaggacacaaacattcagaccgtagcactaatgatcacagaacccaagggaagcagcttgatgttatctagttgtcttaaaattttctcatgttcttgacattctttgtttactctgccaataccttgccttgtgttattagaggagattccttgtgaagtgttaagagatttgtctttgaagtcagatatgagtttactcctgacttagctactccaaagctggcttcatgagcatgcaacctatgcagtcaccccaaaccccacacgcagaagggccccacacttggtttaatgctctgttgttgtcctgcatttattaataattttatctttgagcttgttttttataaatgaagtctgacagcacgatatttatgtccacaattccttgcctcctcattcacacagagcattcacaataccctgtgaacacagaattccagtgggctcacaaggtgcagaagtttagtgggaatcaaagtgagtacaaagtattaagaaaagtatgtctgtggctgagcaagccggggcactgacagcctgaagagaccacattctccattggaacaggaacttgttttgagtgcagaaagatggtgaaggcatgctaaaaaagaaaaaaagaaaaacaacaacaacaaaaaaacaaggagccttatcatatcctttcttactcatggtatttccttgtattagggaactattatgtgtaccttgaatatgataacatagaaagaaagggaaagataggataattcacagtttctttttctttcaggctttccttgtcctcagaaagcaaaggtggagagtgtgggtagaacatacacatatcaaaaagtaaaataaaaacagctgagctagttttgtgcataatttccactgttctgggaagaatggaatatatatacatgtatgaactatgacatacaaatggtgtaattttggcaattgcacatgcaagtgaaatgctgttatatttgcagcttaaactggtacacaatatgaagatgaatgataaaagtcatgccaataattaaagttattaatttccctttatttacaatgatgttaaatagcaaatcttaaaaagcaccatgacaaattgagggaaagactacagatgaaaggaaaaggcttttttttgagacagtcttgctctgtagcccaggctggagtgcagtggtatgatcttggctcactgcagcctcgacctcctggcttcaagcaattctcgtgcctcagcgccccaagtagcggggtttcaggcacatgccaccacgcccggctaatttttgtattttttgtagggatgggtttttgccatgttggccaaggtagaggaaaaggctttatgtttatattttaataccttaacagcatttttcctgcttttttgaataagagatgccacatttttatcttgcacaagatcactcaaattatgtaagtggccagagctacttttttgtgtgtgtgattctgggcttttattattatttttgagacagagtctcgctgtgtcacccaggctggagtgcagtggcacgatctccgctcactacaacctccatgtcctgggctcaagtgattctcctgcctcagcctcctgagtagctaggattacaggcgcccaccaccacacccagctaatttttgtatttttagtagagacaaggttttaccgtgttggccaggctggtgtcgaactcctgacctcaggtgatctgcctgcctcgacatcccaaagtgctgggattacaggtgtgagccacttcgcccgacctgattctgggatttttaaatgaagcaatacagaccttctgattatcagattctttgtctgtaaaatgagtataatgctgaatcattccaaccaacatcaagtgacttctgctgctgggcaattattttattaatttaatattttctatataacttttatgaagagatccagaaagcattctaggggtctcaggataaatagggggaaataaaattacttagagtcagctgggtggggtggggagggatagactaagtgttttgagagatttggcagttattttggaaggaaaaaaaaattcaaagattttgtgatacctggttttttttcttgtaaaaaacagagactttagcatgtcttcttttaaaaataattgaagcagaaagaaaagagttggaaaagcaagaaacagtaatcctagaaagagtaatcataagaactccataaatgtttatgtgattttcagtgctaagaaagatcgcatttcagcattcttaagaagaaggcaaagcagctgttatctcaaggaagcaaagaagctggttctcagaagagttattaatgtaagatgagaagccagagtttaccatgaaaagctgtcgcacctaagcattgacttaatcagcacgaattattccagctttctttgggaagctattaagttaataccagcaggtggcgctttcaaagtaggctcctgaagctgctgctcttcaggaacttaaagtacacttgctaattataagcattgatgaccgaggagcaaggacctatttgggtggtggtagtgaatgtaaggagctttgatgaaagttatatttttagaaaaacagctaatctagtgtaaaattactattgctatgtaataaattcccccaaacttaatgacgtaagataacaacacaccttaattatctgcccagttcctatgggcaggaattcaggaatggcttagctaggtaattctgggttaggttctcttatgaggttgcagtcaagatgacagctgggctgcagccacctaaaggcatgactagggctggaggattcacttcacatggctctgggcgggaggccgtggttcctttctacgtgggcttctccataggcttcctgagtgtgctcactacatgggggcttcccctagaacaggccgttcaagagagaaaaaggcagaaacagcaatgtcttgtatgacctaacctcagaagtcacacatcttcacttttgctgtattctattggtcagatgaatcggtgtgatacagtgtgggaagggaccacacagaggcatgaatacgagggaggtaaggaccactgggagccatcttggagtctggctaccacatttagccactggatgagtaacaggtattagaattagatgaaggaacttatgctgaacaaaaagcaacattgtctgaaaaagcgtggctcagtggaaccaaagaaggtggttaatgagctgagcttgattcattagaaggtctagggtacagaaagaacagattcaggtgaggttataaaactgtgagagataaagggagagtgagcatctcctccttgtatgttgtttccttttgattcctctaaggaaaatatgcttaactaaattccattattaacactggattttctcttagccttattattttccacttcctccctacttccttatctgaaatcctatcctattccattattatttaggatgtgaagtggccttttgggacatgctattccaacccactgctttggtgactttcaagcatagtttaagcaatggcttccttctctatttttcccagttaccattcaatcttcaaatacaaatttatccacggtggatttgaaccactgtatttcccagaatgtggcttatccagttattctctgactctttccacctctcaccttttcagtttgtcttcccaatctgccatctgcctggtggtcatttcagccagtcttgctccagctctattgaggaagggagaaccagacataagccagactaggtattcaattatgtcacatttattcccaccttgtgcatttgaacctttgcctagaatacacaatagtatataataagaatcaaaatgtgtggactgggatataaattatttaagagtttataaaatacagaattagttacagacaaaaaaggccgggcatggtggctcacgcctgtaatcccagcactttgggaagccgaggtgggtagatcacttgaggtccagagttggaggccagcctggccaatatggtgaaaccccatctctactaaaaatacaaaaattagccaggcatggtggctcacccctgtagtcccagctacttgggaggctgaggcatgagaatcacttgaaccaaggaggcagaggttgcagtgaactgagattgcactactgcactccagcctgtgtgacagagtgagaatccatctaaaaaaaaaattttatatatacatatatatacacacatatatctggagaaggtgtcaaagagaaggtaagacttcagcatggtttcgtatctttcctggcttttttctatggatcccaaacaatcaaatcgaaatttctgcaaattattagatgtgttccctgaagcactacatttttctgagccttagtttactcattggtaaccagagggtaataacacccttctgcatggttgtcaagataagagataatttagcaagttaattatcacaataactgataaatgttggaagctaataatgggtagctattgtgttgtcaccatttggataagctccttaaaggctgagaatacatcctgtatgtctgagtctcataaaatctcgtttaaatgcagtggagtttacaggtcttattgagacgtgattaacatttatggcatttcctcttaattgctagactgattactgagaagcgagaagaatgcttcaaacaacaccggatttaaagtctgagaaggatattttggagcaaagaacttctacaacttatgagataaagaagtaggttacacggaatctactaaaggcaatcaatgccataacaagagacaaaactgtttagagtgccttctaaaaaggattctagtccatttacactcatttacttgttattattaatcagtaaggacttagtattgacattttgttactcgttttctgcttgttttgttggtcctctcttcctttcttccttcccatcttcctttgtgtaaaagtgattttctctagtagtatgttttaattccttgctttttattttttgtgtagcaattataggtttttggtttgtagttatcatgaggcttgcaaataacatctcataaacaattattttagacttataacaacttaactattatcagaaagaaaagtttttaaaaacaagcagagaaagccaaacaaacatctacactttttcctgcattttgactttttgttttatctatttgtatctttttacatggtctgtctcttaaaaaataattgtagttactatttttgataggtttatcatttagtcattctattaagtatatgagtggtttacatactgcaattacagtgttacattattctgtatttctctgtgtaattatttttaccagcgagttttatacttttagattatttcttcttgctcattaatagccttttctttcagattgaaaaaacttcctttagcatttcctataagataggtctaatgttgataatattccccagcttttgtttgtctaagtgtttctccatgtctgaaaaataattgtgctggatataatattctaggttggatgtttcttttcctcagcactttgactatgtcatcccacaagcctgtaaagtttctgctaagaaatctgttgccagatgtattagagctcctttatgttacttgtttcttttctcttgctgcttttaagatcctttctttatccttgatcattgagagttttattattatatgtcttgaagtagtcttatttgggttgaatctgctcggcattctttgatttttttgtacctagatattcatatctttctctaggtttggaaagttgtctgttatcatttccttgaataaacattctatcccaatttttctctctctctctctacatcccctttaaggctagtaactcttaaatttgctcttttgaggctattttctagatcttgtaggcatgcttcattcttttttctttttagttttttcctttttctcctctgtgtattttcatatagcctgtcttcacaaattctttattttgcttgatcaagtctgctattgagagactccagtgcatttttcagtttatcaattgaattttctatctccaagattttttaaaagaaattttcatattttattgataaaataatacgtagtcacaaatattgggggaagaaatgtagccatacacttctttgtcttagtaatctatattttagccagctccagaatttccatttgatttaaaaaatttcaatctctttgttaaatttatctgatagaattctgaatttcttcactgttgtcttgaagttcattgaagttcatcaaggcagctattttgaattccctgtctgattagtcatatatcttcaacactccaggatcggtcaatggtgccttattcagtccattcagtgaggccatgttttcctggatgttcttgataattgtggatattcgtccatgtctgggccttgaagatttaggtatttattcccatctttatagtccaggcttgtttgtccctgtccttgagaaggttttccaagaattcaaaggggattgagttttgtggcctaagcctgtggttactgcagccatctcagcacttgggggtgccctaagcccaggaacactgaaactcttacagactcttaggtacacagccttggtgtatctaagacttgggaagataggggagaattccctgggttaccaggcaaagtctctttctctcttccctctctttcccaaatcagaaggcatctctctccaggcttggctaactggagctgggggaggagtgatgcagacactctactggccacagctggcattacactgggtcatacctgaagcccatggccttccagaccagctctgtattggggctcaccaaggcctgcagccactactgcctggttatgcctgcagctaatgtttattcaaggcccaaggccacattagtcagcagatggtgaatcctgccaggaccaagtccgtaccaaccgggcagtggattcccttctgacccaggatgggcctagaaacactatccaggaacaaagcctggaatcgggggcttcgggaatctgtttgatgttttatcgtattgtggctaagctgatacccaagttgcaagacaaagtcctctgtgctcttctctcttctttccccaagcagaaggaatctctccccaagcatcagtacctgaagtttgggaaggagtgacatacatactcctgtggctgccacagctagtgttaaactgtgttgcaccctaagtccactgcctccaagaccaggacagcactagaccttgcccaaggacttgctaacagaggaaaaaaaatctgtgaaatatttcagagtggaatattttgagccaatatgagtgatcatggtcttgggaacagtcttaagaggttctgaggaagtatgcctgaagcaggtaggttatagtttggttttatacatttccaggagaaaagagttacaggcgaagacataaatcgatacatggaaagtatatattgattcagcccaaaaaagcaggacatctccaagcagggacttagtagttataggtgggtcttaaggattcttcagttgacaattggttgagagggttaagctattgtctaaaggcttaaagtcaatagtaagtaatgcttgagttaaaggaggttgtggggtccaaggttcttgttacgttgatgaatcctcataggtagcagccctccgagagaatcaatggcaaacgtctgtctctttgcagacctttgagatgtcagactctcagttcaactctgccagaactgggaaaagcctagaaagggaaggcctggttgcattaatggagattatctacagatgcaaatctcactcacaaaagatagctttgcagggccatttcaaaatatgtcaaataaatatattttgaggtaaaatatttttattccctacagggtctgctatctgtcatgtgatgctatatcagagtcaggttgaaaagcaaaccatattacagcaggtttatttttatttatttatttattttgaggcagcgttttgctctcgttgcccaggctggagtgcaatggcacgatcttggctcactgcaacctctgcctcccaggttcaagcaattctgctgcctcagcctcctgagtagctgggattacaggcacctgtcaccacacccagctaatttttgtatttttagtagagatgaggtttcaccatattggccagactggtcttgaactcctgacctcaggtgatctgcctgcctcagcctcccaaagtgctgggattacaggagtgagccaccacgcccggactataccaggttaacttttaaaactcatttaatgatattttatggtttgtagggtgtgattccttgcatgaatggcctgaggtcttgtttataatttggtatcttattgccacagagtctgttttgtccgtcttatgatattttaacttgaatgctggtcagttgtgcctaaactccaaagggagggggtataacaaggcatgtctaacctcccttcccatcacggccaggaattcaatttttaagatgtttctggggtctctttggccaagtgggagttcattcagtcaatagggggcaagttgggggtgcttagcattttatgtttagtctacacactttagtccttgtgtcctgactgccactcaaatagactcaggacctcagaccactttagttagccagtggtgaagctagccatgacctgggtttctccctctggagcacagaattctcctctgtcccaaggcctgcctaaatgcactgtcagaattctaggcgcctgcagaattctgtcctgtgttatgttccaccatgacggggcagcactgacttccagtgcaaagtcccacactcactttgctctctctcctccaagcacacggattctctttcctgctgtgcagcctgtggttggaggaggggtggtataggcaatacagggagatcttcccccctacccccaccctatcttcaatgcctctttccttatcattacggtaaaagtaggcactgtgatcactcacctgattttatggcttttatgaaggtgctgtcttgcgtggatagttgttctatttggtgttcctgtgtggagaactatctcggggggggttctattcagccatcttgctccacctccgccctctctccagtcagtctttaaactgctggcaccgaagcctccagtgcctttctcctctatatcccatggagagttactgaagtagttctttttggatttcagttggccttttagtagagcctttctcctaaaggattaaaacgtgagactgcgggcttgagccaaaaagcagtcagagggacaaatactgggttttacttagaataacccacctgcctagtgccagcctaccactcttgaacaaaacttgtatgattcccgtgtctccatttagaataatttaattctgaggagacgcctctgtttctccactggcctctggacatggaacaggcacatgaaaattacctggggcagctatgggtcacatcacctctcttactctagccagccagcaggcacttgaagttcgcaatctgatgggctgaatttctgaaaacaataacaaacacaatgtcacttattttttattctctaaatttacaacccattaatatacctccctgtaagctgtctgattttgaaaattatacatgataaaatctttttattatacataaaaaagagttctgtagtttgtattaatagaaaattggtgtccagacatattttaccaagtaagtacaaaataactaaagaatatccatttgaaagatacaaaattattatcctgctaggagcaccttggtgtcaaggtgacttcagggaataatcaggtaattcagctccttggccggagtgaagaatggaatgttgaggctggagaactaagcagggctcaagaggggcctggtgcactaggctaggtcatttgggctcaatcatgaggggacaattgaggcagcattagcaggaaggtcaggtgaccaccaaactttctgccagatctgagtttcttctcttttagaaatgcagtatttgtataaaaatgaaaggcttaccaaaggtcacattttaaattataaagaaaaaaaatcatcttttttttttttttttttttctgagatggagtctggctctgttgctcaggctggagtgcggtggcgtgatctgtgctcaacctccacctcccaggttcaagtgaatctcctgcctcagcctcccaagtagctgggattacaggcacccgccaccacgcctggctaatttttgtatttttagtagaggcgggttttcgccatgttggccaggctggtcttgaactcttgacctcaggtgatccacccacctcggcctcccaaagatctgggattacaggtgtgagccagcgtgcccagcctcaaaagttcatctgtgagccacatttagaaggtagataaaaaattttgactaaacacagcttagaatctataaattgttaaacttcagttctgttgagaatctttgagatccatcattctctaaatgttttctaccagagaaacaggacaatggcttgcaaatattggttatcagtatttactctatagctcaagcaaacaaacttatttgcacttaaaatacaaatattacctaccttgatttgagtgttgttgttctctcttaaatttcatttcccaaaaatgatggcaaaagtactgtttgttttaacttgacccatcttttgcaacccagcttaatcatttcacagattcccttttgaaataaatgggctagatgatcagacaatagtggcaaatgtttgtcatttcaatgacatatgcaagagatacctttagtgaaatttgtatatcaaatttccctttgtgctccttttttccctagtgaattcagcattaaagtgtttataaatatttttggtttattatttattaattcaaagcaaagaatgccaatgtgaccataaatatctcatttatatatcataaatatctcattatagaaatatgtttagagacatctgttttattattttaaagaagagtacatattatatattaaggtaaaaatagtactaaaaaagagaaggtagtaaataaaaaaattctaatgaacataaaacatcataaaaattaacttaattaaaaatcagccaggcacagtggctcatgcctgtaatcccagtactttgggaggccaaggtgggtggatcacctgaggtcaggagttcgagaccagcctggccaacacggtgaaaccctacctctactaaaaatacaaaaaattagctggatgtgatgggacatgcctgtagtcccagctacttgggaggctgaggcaggagaatgccttgaacctgggaggcagaggttgccctgagccaagatagtgccactagactccagcctgggcgacagaaagagactctgtctccaaaaaaaaaaaaaaaagtataaagataaaattttagtatattgtgaattaattactagactcaattgttataggaagctttgtttttctggagctcttatattaaaattattaaaatcctcactgaaaagtataacatgtgttttctttaaaagaaagatattctatatctgaataaagacaaactttgaacgagtggtatatgccttaataaatattggagaatatctattctccaatacttagagaatgacgacagcatcctccacatggcgttttcattgccagtcacaactttcctccacctagtgttctctagactgagacagaccaaggaacaattccctagacctcctttgcagagctaggttatgctcagaccatttgcagcaccaaggacactgccattcaggtcaccaaaaaaagatcatcttgtgagccctgtctaaaccaggccccttctaaaatcatttcagtgtgaaactgagtccaggtgggtcttcatcagtattagagtggacctgccagatgtatgcttgcagatgatgcaacatcaaagcaaatgccctgggcaagagaagaaaggccaaagcaatgggcttactggtttctagctttgagccactcttcatagtgccaaattcccattttagggtccctttatttgtattaataaaaataaattccctgggtgtaagttcctgtaaagtactccctatctgtattcctgggcatgaaagggtgttttagttccaattctagttttcccacttagaggttcacctttctgacattaataattaaccagattatctgaattcttcaagttcagtttatttaaaaggagactatcctcaaaagtgttatatccgtggtttcctgctacctccaaccatgggccttttgggaatactttgttttttaatcttcctggggaaaacctggggacaggagcaaacgtaagtaaaacaagctatcttcatttttcaatgcatcttagttatgacgaatgaagagttaaatttaacagattctgttaacttgaaaataacttgctacttctgagaacagcaagtgaatagtatcatctctgaatgagaaagtcatggaagcattttgatttgatgagtagctaacaacatgacagcttttatggaattgttatttattaaaatttacgttaagtgattattcaaattcctcttcaaaaaagcacaaaagaaactccagataataaactttcttgacattttttgcttattttaacttggtgtttagttttctttgtgtttttcatagactatacacagttaaaccagggttatttaggagtcaatctaatactgtgatctgaaaatctgttgttgtagtgacttctaccatacatttatgagctgacttttcacaatttttagtgtcattattgagataatatgcattttaagtaatgttttaaaaataatgatcttatatctagaaatattttaatactgaaaagtaactgcagatcatctaatcaaacctattcattttatatatgagaataagtccagataagggaagtgactgaccaaaggtcacagttctagagagagagaaacaggatttttattaaggtctcctgtttatcacttcaatttttttcattttgtcataaatgtatacatgtaaatatattatatataaacacatacttaggatgtcattcttttttagcaccctcgtatttctgatctgtgatctttttacatggccacaagcactcaactaccttagcatcctgcctttattctttttgaaagacgagcagctaaggcttagagagactgaaattaagtgacttcaaattggtggcagaactagggctaggacctgggttccatgattcttgtccagacttattctgaattctttctactagcccttaataaaaattatttcctcactttctctgaagaagtcagagtgtaccatttacaacatggcaatcaatcactttaattaattggttgattgattgattcaacaaatatttattgagcatctaaacatatgataggcactgcagatatagcaaacggtaagacaattcctagagcttgcattctagtgggagaagcaagtaatgaatgaatgaaccaatgaaagaatgtgtaaggtcaggtaggtagtattatgaagaaaaaaataaagcagagtatgagaattaaaaaataattatggggcactattttaaaatgtggccaggaaaggttctcttaaggaggctgcactcaaacagagcctgaaggaagtgaggaagcaaaccatgcaaatatttgaggaaagagcattccagatagaggccaaaataacattcttgcctctctgcaagctcctgctcctctgcagcaattgaaagacaaagaaaactatgaaattatttatatggatagattatgctactgataagtcaataagaaccaaaatctttataaagggtggttccagaatattcttttaggggcttctaaacactatgtatttttgcttgacggctaccatcacatagaccagcagtccccaaccattttggcactagggacaggttttgtggaagacaatgtttccatggaccaggattggggtggggatggtttcagaatgaaactgttccacttcagatcatcaggcattatattctcataaggagcttgcaatctagatccctcgcatgtgcggttcacaatagagttcatgctcctaggagaatctaatgccaccactgatctgacaggaggcagagctcaggtggtaatgctcctttgccccactgctcacctcctgctgtgtagcctggttcctaacaagccatggactggtatttgtccatggcccaggggttggggacccctaccatacacaattcaaaattaaagcaatactaaacttaaaaacataaagcttctataaatactgaaattaaagtagctttatatccctaaatttttctaattacaaaactctttataaattccatttagtacaacagttgaaaatgttaattctggaaacgggctgctcaggttcgatttctaattctataatttgtgaattatagaattcataaatcctatatgtgtggccttgggaaaattaattagcagtttcttcaccttaaaattggagtaatagttcctcacagagtggttgtaatgacacaatgagtttatacaaataaagtattcagaatagtgccttatcacagggcaaaatttcagtaaatatatcttattatcataaaaactgaactcctctcattttctgccatctcctactaggcatgtggggaaggggaattcagatgatggttggaaatctggaaattctttcctctcttttgtaatttgcctgtaagtggatccaaattaattgtaatgcaggataactgtcagatgctttaaaggatttaattgctgataaattaattccattgttactaaaaacttcctgcttttaccagactcttaaaatgtcacaatgttggcagaagcctggaataattctgccaggtggggtggtgggtgccctccaagcttgttgggccacttgaattagtcgatcactatgcccttttgggttaaaacacttttttttcctatgtaatagcgtatgtagttctcgctattcaaattagatactcttgtgatatacacttagtaatccagtttatatttgtaagtttttaaataaaataatttttaaaaatcactcaaaagcatgtatagactcacttccattattgtataaatcacatgaaaagtaaaaataagagaacagtctatggttgtgaataacatataaacttgacctcaactgtacacataacaactgagaactcatataaaggcctcccccatttacttacaaaccgtataaccttagccaagttagccttttaccacttgcaaagtacgaataatgatagtaccagcatcattggcttattgtaaaaattaacaagagctgtatgtaaagtgctgatacagcctctgatatgtggcaagtacttaattaccattattgtttgaagatgatgatttgctcttaaaggaccatcatcactatttccatttccaaatgcacttcccagctcactcatattctatcctttccgttatccgtttactagtataacatagtatttctaagatcactccctttaaactaatttagtgagattaataaatcttaacatgtattgagtactaagagtgctagaccttttcatatatatgttcttatttaatctttaccagagcctggtaaagaaggcgattattttcacagtaagttattttagcctcagaaagacttagtgactttaccacggtcactcagccagcagatgccacagctggaattcaatcactgcttttttcttcattgagcaaaaaatattgaccccatttacatgttctggtcaacatgattaaaagtcttccttggctgcagtagctaagagaaagtgctgctatcaccttaactttctaaatgtaaactaaacctccagcttctcaggtcttaattccaaactacttggaaattatgctgaagttatggtgggtcacaagtacattttgacttattagtatcatttttaagtgaggaaatatatgtattttaaatggaatctctcaagtgagagaaaaaaatcaaaagtaaaagaaaatatgtcatataaagacattgagccttatcttttcctttttcaacagatatgtcatttcagcaccaaaaatattccgtgttggagcatctgaaaatattgtgattcaagtttatggatacactgaagcatttgatgcaacaatctctattaaaagttatcctgataaaaaatttagttactcctcaggccatgttcatttatcctcagagaataaattccaaaactctgcaatcttaacagtatgtatttatcctttattttctttatatatatatacagaatattctcaataaaaatgtgtacaaagtttgaatattgataacatatagatttaatcatttacatccactgtgggattattagatgatgtcagtcactaatgataatgtaagtgaaaattctaacagaaacagaaaattctaaacagaagttatgtctgctttttgagcaatgcatgtccattttcacattcttattggaaaataaaattgtactaatgtgaaaatatttggagataattgaaaatacttgtttgctatgaaaattactattagaaagaaattgagaaatatgagtatgattttatctgtagtacattgcccacaaaaatccatggatattattgaacattcgattgaactctaatattctacaattatagtttcaaaaactaaaaaatttgtgattactaaagtgaatagctctcattgacaacctgcagttaatagaaagaacaaccttgatcaaataactctcctattaagatattgtagtatagattgcttagagacatacttgcaacttatttttactaaaaattctgatacttaataaagaaaatcaaagaatatcagacgtaaaatgggctctgcagttcatttagaccagagtttctctaaagtgagttctttataaagaaattaaaaatggaaatttaataaagagcttaaaattcgaattatattgattttgtaacattttgaatttattttataaatttgttttgagtttttaattatacaaaaatcataagcataagattgtaccgttttaagtttgtatatatttaagtatctttgtatcaaaaattattttgattatgttataaataataaaaagccaatgctgagggtcctccatgacttttgtcctttaaaaggactatgcatattactcaagtttaagaaacactaatctaaaaaatttctagtcaaacataggaattctttaatgttcttagcagtaaatgctcatatctcttaacaaattcttccacttattaggtttgttaacaattaaaattcatttattaaaagtgttacttttatggcatatgcctgtaatcccagctactcgggagactgaggcaggagaatcgcttgaacccagaaggcggaggttgcagtgagccaagatcgcgccactgcactccagcctaggcaacagagtgagactccatctcaaaaaaaaaaaaaaaaaaagaaagtgttactttcaaaagacactcttttatctgatacaatgtatttgtggctcttagttttaaatttaaatcaaacaaatttaactgaaattaaaaatgcagtatctcagttgcactagcaacatttcaagtgttcaaatagccccaggtagctattggctaccatagtaaacagcatagatatagaatatttctgtcatcacagaaagttctctgaacagtgctgacctatatgattaactgaaaaactagattaaggtggggcaatcatagtcaatacatattttaaccatttaattttatcatagcaatatcatgtatctttatttgccaattgtttaatgttgtaccaaggtcttttaagtgtgggtctatggattgcagtgtcaaatctcatttattacgtgctacaaatttaatggatcatctttgttctatagtttcttttttgttgttgttgttgttgttgttgagacagggtctcgctctgtcacccaggctggaagacagtggtgtaatatcggctcactgcagccttcgcctcccaggttcaagcaattctcccacctcagcctctcaagtagctgggattaacaggcgtgcaccaccacacctggctaatttttgcatttttaataaagaaggtgtttcaccatgttggccaggatggtctcgaactcctgacctcaggtgatccgcccgcctcggcctcccaaagtgctgggattacaggcataggttactgtgcccagcctgttctatagtttctgtttcttaaaaggggagaaagaacttaaaggcacttacaaagcaatctgggtgcagaatatttatagatttttcttgttttccaaacttttacaataatttcgcatagctaattctacagcagttggtttttgtaattaactttcatcccgtgtttccaaagcctaatttttcatagatacacttttcttttttatcacttttcatgcattaaatttacatatcattgaatgtaaaggggataattacaaacataaattggaaaatgagcatctcaactcaggggagcagaaatatgtgaggtaatactaagggtccagagatgctggacacatgggcacggtgactgatgcctgtaatcccagcactttgggaagccgaggcaggtggatcacttgaggccaggagttcaggaccagcctggccaacatggtgaaacccgtctctattaaaaatacaaaaaaaaaaaaaaaaaaaagttagctggacatggtggcgcacacctgtaatctcagctacttgggaggctgaggcaggagaatcacttgaatctgggaggcagaggttgtcgtgagctgagatggcaccactgctttccagcctgggcaacagagtaagtgagactccgtctcaaaaaaaaaaagctaagggtccagagaatcggtcaggaggtttcacaaagggaatggggagcatggggtaacccagcaaactaattgagtgaaggtttcttaaaggcttttatagtagtagtttcactaaatgtatataaaatttaggaaacatggaaccaaagagactttcaattgcttaaagctaaatttttattatgtaattagacactgaagggcttcgggcaaaatttatttactcttcttgctcctgtatcactttttaaatgattacatatacatactgattgttctaatgagattacagttgtatttagaaagttaatggtttaataactttagaattattatactttttccatcaacaatttcttttccagatacaaccaaaacaattgcctggaggacaaaacccagtttcttatgtgtatttggaagttgtatcaaagcatttttcaaaatcaaaaagaatgccaataacctatgacaatggatttctcttcattcatacagacaaacctgtttatactccagaccagtcaggtagattataagatatttcttcctctgggtgggggatttgacagtattgacactatattgtagagctttttaatacctgaaattgagtggagatcggtttctttttaatttgctcaaaagactctcaattcccaaagacatctatacttacaaatatttaatagcattttaattttaaatttatggagaaagtgctaaataaattacaaaaccaacaattacattacctgccccatcacttatttccaagtagaaaatgctttttcaaaattgtaaaatgttgaatgttatgtaaaaatgtaaaatgttatgttgttacaaaaaccaactgctgtagaattagctatgcgaaattattgtaaaagtttggaaaacaagaaaaatttgttttccaatatgttacaatttattaaacaaatataagacttaattgcaaatataatttggcaatgggaaaatataatttattgtagaaccatgttcattaaaaattccactgggtctggagctaatccccaaactggaaaaataaatctaacctaggggatcagatatttcagcagaggataaactagatcacagaaatatatggatattaattttcaaaggggatctacctaagaaagttactgttagaacattgtttaacattcatggttcttctgttagaggcaaaagggcagaatagccaatcaaaatcatgtgaataggaatgactggacctattcccaatgaaccaaaagtaaaacacagaaaagtatgaatgcttcccaatatattcatgtgtttgcaaagccttccattcccccgtttctccctctcgtcatcaatgacttttaagtacatcagaaatagaatattagagatgtatatatgggaaggagaggctatggaatttcattaatgatattcttggaggaggacagagaaaggaagtggggaccatctgactttgttgaaaaactttgtacacagtagatatttgctaaatgttggttgatgttgatgatgagaatagtggggtggaactggactgaaccattaccgtttcagcaggagcatttgttatgatcagctcagaaaggaaaagcctaaagggggtggagatattgctatctacttggccagaataaaatctccagaataatagcatcttttttctccaagagacaactttttatacaaggaaatagtctctgcccacaaaggttgggtccttttagacataatcatacctagaaacaagcatatcatctctcttgtcctcctcctacattgaaggattcttttttgcttggatcctgttgacacgtcccacaactaagggtcatcagtctttgtccagtaagcagtgtaatatccagaggctgggaccttcctcggttatcaaggctttccttaagaatggcttcatgtctcatgcctgtaatcccagcattttgggagtccgaggtggggggatcacaaggtcaggagtttaagaccagcctggccaagatggtgaaaccctgtctctactaaaactacaaaaattagccaggcactgtggcaggcgcctgtaatcccagctactctggaggctgaggcaggagaatcgcttgaacccaggtggcagaggttgcagtgagctgagatcaagccactgcactccagcctgggcgaaagagtgagacttcgtctcagcaaaaaaaaaaaaaaaaaaaaaaggcttcatgtattatttctctatcaggactttactgtaagatgatgtaatacctggccaggcacagtggctcatgcctgtaatcccagtactttgggaagcccaggcgggtggatcacttgaggtcaggagtttgagaccagcctgaccaacatggtgaaaccctgtttccactaaaaatacaaaaattagctggatgtggtggtgcacgcctgtaattccagctactcgggaggctgaggcatgagaattgcttgaacatggcaggcagaggttgcagtgagatcgcgccactgcactccagcctgggcaacagagcaagactgtctcaaaaaaaaaaaaaaaagagaaaaaaaaagaagacgatgtaatatcctcatccattctaatcgtagagtaaaatgagagaagtttgctataaatattggcccatttctgcaagatagtgaagtaaattggttaaaagcagactctggagtcagattgtctgggttcaagtcacagcttgagctgctgtgagctgtatgaccctgtgtgaatcactcagcctctcagactcccactttcctcacttgtaaaatagagataataatacaacttacctcatagagttgtgagaattaactgaattagtatgtgtaaagcacttaagatagagccaagcacacagtaagcactaggaaagtgttttccattattatctatggaatagcacaaagccatatttacagaaaagaaaaataattacttaaaagtattttttaatcgtcttgttatttatagctataatgtcccgatcaacacatttaatctgaagattcttgagggatttttagtgtaagcatctttaggataaaggcttcaaggctttactggataaatgactttagaatattgcccaaaatccttcaatttcataaagcctgtgtcctgccttcttccccagcttcatcacctactacggccccaccctctatagacacaagccaaactgacctcctttcagatgctttctcacaccgtttccccatccatattaaggcctgtgtaacatgctgttgcctctacatggtacattcttgcccctcctttgccttgttaactcctacttcaccctcacgtgtcatcacagatccttctaaaggcagctttcgctgatttccctgacctcttcaaatctccctcttctacatgctcataaggccaggcaaatatcctttgtggcacttcacaccctagaattttacatataattgtgtttgcctctttcctccacaccattaaaagatgtccatgtctgatttgtttcactactgtatctcagtacgtagcataatgactggcacattagaaggcattcaaggccgggcgcggtggctcatgcctgtaatcccagcactttgggaggccgaggcaggcggatcacaaggtcaggagatcgagaccatcctggctcacacgggatgtgagctaatacaaaaaattagccaggcatggtggtgggtgcctgtagtcccagctactcgggaggctgaggcaggagaatggcatgaacccaggaggtggagtttgcagtgaaccgagattgcgccactgcactccagcctggcattcaaactttttttaaattaataaaccacatcttttatttttatttttatttagtgagtgtctcgctctgtcacccaggctggagggcagtggtgcaatcttgtctcattgcaatctccgcctcccaggttcaagcgattctccagcctcagcatcccaagtaagtgggattcaggcgcgtgccaccatgcctggctaattttgtatatttagtagagatgggatttcaccatgttggccaggctgggcttgaactcttggcctcaagtgatccacttacctcggcctcccaaagtgctgggattccaggtgtaagccactgcacccggccaataagccatatcttttatacaaaaaattgtatagatcttgcctccaatgtaccatcgctgtgaagacaagattaattttctaacctaaacacaaactgggttaaaaactagccaaatagtagtaacagaaataataataaaataaacatttattgattacttagtatgtgtcaggctatgcaaaagctttgcattatttaattctcacaaggacactatgagcacacactagtattcctgttttacaagtgagttaactaaggtttagagggattaagtatcctgctcagggtcatactaaaaagtggcagaggcaggagtgaaaccaaagtgtttaattccagggcctgtgctcttaacttttgtgactttctgacttgggcagcttcccagtgatactcaggcctagactgggtgtgtcccaaaaagcaggagataggatttgtggtgggagacaggtgtgaggggaaggagagagcagagaggtggggcatttactgagcacattgtttttatcttgtgaacttagtaaaaccagtgttaatgtggcttcttatatagagctttgcataatactgatcttttaaaagatactgggtttatggtgccagttctattttattttgtgggtaaagttttggccatgaaatgatttgagcatcagcaacaccctagagaaattaagtttgtcattggaaagaattagatcactgtgtctcaaacagctgtgagttaaaagcgaaacagatgcttttgtttaaaaagtagggatctattaactgacagaaagaaatggaagagaactaacagttattgagcccctgccattgctcttttaacaatgagcgaacaagtgtaggatctggctcaataaatagaacaaaaccatataatccaaagctgccttttgcaataagagctaatttggagccttgtgggttttcataagtggaagagtgtatgtctgaatcaagctcccaattttccattaagatcttcaactctgagacaatatattatgctcctctataaccatatggtgatgtcactattttgctactatgaaattcttaataaataatggcctaattacagatgtaattaatttcatactgtgaatgttttctcaaaacattgtaggtaaatgtattttaagaaagtgaactgtactttaaatccactaagagaaatagttctttaaaggaatccctgaggattctcttaaataagagaatctttagtaatgtatatgtctgcaaactaatttttgtttttttcaaatatggacttttgtgtattgagttttttaaagtaagattcatctcttttaaggatggttgttttaaaaaatcaaaatatccttgtttttagcagagtttttgattatatcaattattcttacagtaaaagttagagtttattcgttgaatgacgacttgaagccagccaaaagagaaactgtcttaactttcatagtaagtattttatttatttaaataatactttaattcatttttcaggacaagaatctcatttcataaccctgtcctcacactacactaaatcattcaatgttccataaatggttattgaacatctgcaatgagtatagaatcatagatctatacctctgtaatacacgtatgtgaaaggctcatacaaattaaatttcaataacttgaaggattttgagctaaaccatttaagtacaatcttgctgatttattttttaaagaacacccactggccgggcgtggtggctcacacctgtaatcccagcactttgggaggccgaggcaggtggatcacgaggtcaggagatcgagactaacctggccaacatagtgaaacctcatctctactaaaatacaaaaaattagctggtgcagtggcaggcgcctgtagtcccagctactcgggaggctgaggtgggggaattgcttgaacccgggaggcagagcttgcagtgagccgagattgtgccactgcactccagcctggtgacagtgtgagactccatctcaaaaaagaaaatctaaaaaaaaaaaaaaaaccaaaaaacaaaaaaccacccaccaatcactaagaattgactgaatacccatttaactataagatatacataatggatatatctattatgtatttattatgtgcaaaagaactatatttaatggtacttactcttaaggaacttagagtttaataactattatactaacacaaaaaatcttgctaaatcatgagttaaagattggcagtaattcaccatttatcagacatgacatatgtaacagacgctgtgcattgaactcccatgatctcatctaatttgtgtcacataccccaaacacttttgtgaggaaataaaataatacaactagttataactgctcagttattaacagtaggtatactactaatggtccttcaatataggctgcagcacttttgctgctactcaaaaaaaaaaccaaaaaataaaaataaaaacttatcagaatgcaggtgcaaaagcatagatactacagaacaaaaccatactaaaatataaaacaaataaattatacagtaggacaaataccatgagctcagagggaagaccaatgagaggtgagagtgggggtgatacacatccttctctggaacggagtagttaaagggaaccctgagttgggtgttaatgaaaggaattgacataaattatttaaaaatagtgaagaccatccatgtaagaaacagtgtgagttaagctatgggggcaagaagaaataaaaaaaaatgaagctagtaaataaactgattgactgatagaatgtctgaaagagaactaaggagagcaatgtcagctcaaatgccctttttctatcagggaatgataggggtgtggatgtatgctctttatccaacgtcttcatggttgaacttaagtgatgcagaatcatggcataacctgcagaaaaatgaatgtcagtcatctcttgtaagagctgccccaggaagaaaagattgagaaagctgatcccagagccttaaggagttaatatagaggaagtatcctcaaaatagtacctgagaaagatgatcttagaagaattgtgcacaatggatagtgcgatgaagaagagccataaaaatactcagctacaagtataattcttgttcaaaataggcttctgtaagttttacaattaattacgaaataaaacctctaaaatccaactgtgaatttcagtcatggtaaatggtgctaagattttttgctttgggttttttgttggtttgtttgtttttgtttgtatgtttttgacagggtcttgctctgtcaccaaggctggagtgcagtggtgtgatcatagctcactgtagcctcaaactcctgggctcaagccatcctcccacctcagcttcctgagtagctaggactacaggcacccatcaccacaccctgctaactctttaaacatttttttgtaggctggtcagtgactcatgcctgtaattgtaatcccagcactttgggaggctaaaatgggaggattgcttgagctcaggagattgagaccagcctgggcaacctggagagacctcatctctactaaaaattaaaaaaaaaaaaatagctgggcatggtggcatgtgcctgtggtcctggctacttgggaggctgaggtgggaggattgcttgagcctgtgagttcaaagctgcagtgagctatgatcacaccactgcactccagcctggatcacagagcaagatccctgtctcaaaaaagttttttgtacagataggggcctcacttatgttgcctgctatgtttatgtgttgagttaaggctgaattggacccccatgtgtagtccaaagaaagtcaaaacctcatttcaattatttgctaacccaaacacaaaattaagtttatggggaagctttacgagaactgtcaagtttgtttaaccatttgagagttttaccaagctgaaaaatgcccatactatacatttataaaacatctggctaaaaaatataattcatagaatatttgcttttgaaagctttaaatgaacatatataaaaattagattctggtgtttataaagccaacaaaattcacatttagtttatcaaaaacatcattgtttgtttgtttgtttgtttgttgttgtttttacgtgttgttacacttcatcttttagatgtacaacgagagttgagtctcttcaagataatgaggagagatggggaagattggaaaaagaagaagggaaatggctgaaatgaaccatatttcccttctataacatttaacagatcttcatccttcatatttaatttgaagacatgggtatttgtcttcaaatatttgatctataaatattttgtacatcaaagattgtataatcagttaaattttttaaaatgtagtttctggcctttgagggtgtttgtttttatttacaggatcctgaaggatcagaagttgacatggtagaagaaattgatcatattggaattatctcttttcctgacttcaagattccgtctaatcctaggtatgtaaaaatagttgttaataaaaccacatacggaacttttggtgaagaagcaggtaaccagttaaagggggccacctaatgttaacaaagggtgtcacataggtggatatgcaaaatcttttgaagttctagcaagaacttaagctctgttcttggcaaaaaatttccaatacttctcagccattctttttacatatagaaataaaaattgggaagaggaaaaaatagtacccaggtttttttgtcataaaaaacatcaactcctacccctcaaagtatctaatagattgtcagtttaaaaggctggtgtggtcttgttccttgctctggttgctataaaatagggtcgtctgtagtttttgcctggataaactaccagaaggcaaagtccaagagggaaggagttctcagagctatatctattatttggcctcacatgaaaggatttaagaaaaagtttaaacagggttcaatgtaataaatattcaatgaacacattcttggtatgtgcaaatcacaataagagggagagatacaaaataaataatccacagtccctgctttcaagaaatttgtaataggccaggtgcggtggctcatgcctgtaatcccaacgctttgggaggccaatgtcggtggatcacctgaggtcaggaatttgagaccagcctggccaacatggtgaaaccccgtctctatcaaaaatacaaaaaaagccaggcgtggtggcaggcacctgtaatcccagctactcgggaggctgaggcaggagaatcgcttgaatctgggaggtgagggttaaagtgagccaagatcatgccactgcactccatgttgggcaacaggagcaaaactccaactaagatagaaagaagaaggaaggaaggaaggaaggaaagaaagagggaggggagggaggaaggaaggagggaagaaaagaaagaaagaaatttataatagagcagaatgaataagacaagtgcatctatacatggctgcactagaattttagaacaacatctttttatggtcatttttcctctgccctcagttaattcgctgactgaaatttttctaaaaatttaaattgaatttggaggttttaaataacttggataatttaaaaattgtgtacattcttgaaaatactacatgttccatagtgcagaattaaacctattattttattactgctatcatttctccaacttcatcttgtgccacttgccccatggcaaattatgtgctagccatggtctggcatgtccagtgctttcctacctccgtgcctttgcacatgtcatcccctctacttggaatgggcttcacctggctcttcataagcctggcttcttttcattgttatgacccagagtagaagctactacaaaaaggctattcctggatgcatgatgtaatgtaatctcttgctttgttttactccctatctcagcatcttgtttattttcttcatgacacttatctcaatgtcataatcatttctttacttgcttgctggcatttttattccccactagcttataaactctttaaggtgggccttgtctgtattgcacaccagcagttcaacataataggcccttgataaatattcattgaattgatgatgatggtaataatcattattataatactattaacatttgtggacttcatagccaatctgcaaggtaggctcagtatatatatgtgtgtgtgtgtgtatatatatgtgtgtatacacacatatatacatacatacacacacacacacacacacacacacccatagtttttttgaaacagagtctcactctgtcacccaggctggagtgcagtggtgtgatctcagctcaccacagccttgatctcgcgggctcaagcaattctcccacctcagcctcctaagtagctgggactacaagcatgcaccaccacaccagactaatttttgtatttttttgtagagatggggtttcatcatgttgcctgggctggtctcgaactcctgggctcaagcgatcctcctgccttggcctcccaaagtgctgggattataggcatgagccactatacctggcctagtatatgtttttgaataaaggttattaattaaagccaggtcattttcatcttttaaaaaccatgctttgtttccaaccataaattcatttttgtgaggtgtaaattttatcatctgtataagcttgtcttgtattatatgtttctagagacgttattatggattttgtactgtattttggattttagtattatgttagcataattaggctccaagattaaataaattctcagaaataataagttcttcaaatcaaaactaatgactgtattaagataaaataccaggaaaaataatacaatatatgaaaaactggttactaaacaatatctattatctattatcctaaaaatgctcaattatttattgcttaaaaatcagtcacaaataaaatatattacttaggttttatatatctttgtgtattcttccctctttaaaacaggaatttattagatctcctctgagtgaattaaaaacatttgatgacatctataattttaaatattttgcttccacagatatggtatgtggacgatcaaggctaaatataaagaggacttttcaacaactggaaccgcatattttgaagttaaagaatatggtaatttctgacaagtaaaagtttttctttgctttttgttttttgtttttgagatggagtctcgctctgttgcccaggctggagtgcagtggcacgatctcagctcactgcaacctccgcctcctgggttcaagcaattctctgcctcagcatcccaagtagctgggattacaggcaccaaccaccatagccggctaatttttgtatttttagtagagacagggtgtcaccatcttggccaggctggtcttgaactcctgacctcgtgatccacccacctcggcctcccaaagtgctgggattacaggcatgagccaccgcacccagccaattaaaagtttttctataaaaagttagtgttttgcaataattctttttaataatgtagttaatgcaaaattattcccagatgaagatgaggcagcctgtacgtatggctagaagtactggctagaggttggagggaggagtagtagttgaatgcctagattctagttccagcatgcctttaaccctgatcaagcagaacaacctctgtgtacttgtgttccccatcagagagctggaagagatctagtcccctgaagagcttgactagtaaagatcctttctagaattgtgattattattaggagaaacttaaatagtcatagatgaggtgagtggaacccagtaaaaccaataaatgatttacttgagtcttaaaaccaattagtgacaaaacaaaaacaacaattaggtttccttacccctagtccaacactattttctggctcctaaattcctaatatattcatttgaatatttaagatattcttattttgaaataaattatattaatagactaacaagtaacgtaaatagtttaatctttcatttcttatagtagtttactagcatttctgtgtgctctgctatcaaatttaactttcttctgcttgaagccattttttattccctcaagagattcataatgacatggagaagaataaatactgacacaaattttaacaattaacaagaaaaacagtgacaaaacaaattcgttatgatgaaactcaaccttaaagattacaggctctctgtaacatataatcctaacccatctcccttcttctaagtgtttttgtattttctctgtatatctagaatccacccacctcttactgtctgtagccactctcatcaattcatcagcactctccctcctggactacagcaaaagcctcctaactgatgtctctgcttccaagctatcttgcttggtattagccaaaataatcttgaaatgcaaatttcattatgttatgtcacaattgaaaagtttttttgttttcaaggaacctatactctaatggaagaaataacctattgcctataataaatgctgtaatcaaaatataggcaaagtgcttctggattgacctctgattgttggagtgggaaggttctgcagagattgttgttggtgatgacgatgatgacgatgatgattatgataataaagtggatgttgtgttgatgttacagcttgtccaactataccagaaagtctagctgtttgctaggctttaaagtctgctctaatcaaaatggtaatattacctgtttgtttttattttcagtcttgccacatttttctgtctcaatcgagccagaatataatttcattggttacaagaactttaagaattttgaaattactataaaagcaaggtaagaacatttgtttttttgttgtttttatttttatttttcaaattaactcaactctggttgatgatagttgcccaaagtgagatctgtgatttattatcaaagtgtgccatgatttggggactaattgataaaggagacatcatgctggtagttcatttgcttattctgattttagctgattctgagtttagctttgttggctattcaacagcaaaaacaaagaaaagtgccaaagatctaagtttggtgtatgtgtttagaaactagggtaacttagaatattgggactgagatatgaaggattcacttcctatctttttttaatgatttaatcagccagctaatgctgcgtaactacttcaaaacccagtgccttgaaactcccacatttatgagtcagctgggaagttctgctgatctgggccaggctggtgtcagctgggctcacccatgtagctgcagccagttggtaggtcagctgggggctggctggtctaggaaggtcctgtccatatgtctggcagttggatggggctaaaagtgtgtgtgcctctcatcatccagcaggctagcttgtagcagcagcaacactcaaagaggcaatggaagcatgaaagtccccctgagcctaggcttggtgctggcacaccatcacttccacacattcttttgtccaaagcaagttacaaggtcagcccagaggaaatagacccctcccacactttgtggacacaaggaactgtgcaaaggtcgttgatacatggggaggtagagaattgggggttagttttgcaagcaacctatcacaaaagcttaggtcattttaaaattacaatataatgtagttataccaatctatataactatatgtgtggggtactcttctaagtactcagcatatattagcacatttaatctttacaacaactctatgcgttgatattgttactattcccatgttacaagtggaaaaactgaggtacataaatgtttaataatttgctcaaaatcatacagctagtaagttgcacagcctgtctgcttccagagtccatgcctcaaacattaccctatgctagctctcttattagcattgatttgaaaaatagagtgtttattacttggtctaaaccagcataaaaggctcacttgagagaaaattatagaaactgacctcctataatggggactatttattcaaaccataaataaggaaagttagctcttgctatagtattatttgctgggtagaaagtttactttattcttactttaattctaaactaaaaagggaaacatgcagtttaaattttttatgaatagatctcatataacagtgagattggacacgtaccttttaaaaacataaaagaaaacagagagtagctgatatcaaaattatcaaggaagtaatttggcatataggagagggccctgattctaagtcttgtgatctccccaagatcaatttttttcatctagcacatagctttattaatgtggctttatgaggatgaaatgtaatagtgcatgaaggacactttatttattattattatactttaagttctagggtacatgtacacaacgtgcaggtttgttacataggtatacatgtgccatgttggtttgctgcacctattaactcatcatacattaggtatttctcctaatgctatccctccccgtcccccaccccatgacaggccccagagtgtgatgttccccgcactgtgtccaagtgttttcattgttcagttcccacctgtgagtgagaacatgcggcatttggttttctgtccttgtggtagttcactcagaatgatggtttccagcttcatccatgtccctgcaaaggacatgaactcatccttttttatgcctgcatagtattccatggtgtatatgtgccacattttcttaatccagtctatcattgatgggcatttaggtgggttccaagtctttgctagtgtgaatagtgctgcagtaaacatacgtgtgcatgtgtctttatagcagcatgatttataatcctttgggtatatacgcagtaatggaatcactgggtcaaattgtatttctagttctagatccttaaggaattgccacactgtcttccacaatggttgaactagtttacactcccaccaacagtgtaaaagcgttcctatttctccacatcctctccagcatctgttgtttcctgactttttaatgattgccattctaactggtgtgagatggtatctcattgtggttttgatttgcatttctctgatgaccagtgatgatgagcattttttcatgtgtctgttagctgcataaatgtcttcttttgagaagtatctgttcatatcctttgcccactttttgatggggttgtttgtttttttcttgtaaatttgtttaagttctttgtagattctggatattagccctttgtcagatgggtagattgcaaaaattttctccattctgtgggctgcctgttcactctgatggtagtttcttttactgtgcagaagctctttagtttaattagatcccatttgtcaattttggcttttgttgccattgcttttggtgttttagtcatgaaatccttgcccatgcctatgtcctgaatggtattgcctaggttttcttctagcgtttttatggttttaggtctaccatgtaagtctttaatccatcttgaattaatttttgtataagatataaggaagggatccagtttcagctttctatatatggctagccagttttcccatcaccatttattaaattgggaatcctttccccatttcttgtttttgtcaggtttgtcaaagatcagatggttgtagatgtgtggtgttatttctgaggcctctgttctgttccattggtctatatatctgttttggtaccagtaccatgctgttttggttactgtagccttgtagtatagtttgaagtcaggtagcatgatgcctccagctttgttctttttgcttaggatgaaagacactttaaagtgcctcaagtgctttacgtaatttcaaattgttacattttatctgaatcctgttattgtaaccatgttagtaaaacagttttatgctattgtctgacagatatttttataataaagtagtcactgaggctgacgtttatatcacatttggaataagagaagacttaaaagatgatcaaaaagaaatgatgcaaacagcaatgcaaaacacaatggtaagatgttaagacacagtcactcacacctacagatgcatccagaggtgagagatgagaagttacttaaaaaccatctagtccaatcccccattttagataggttgaaacttaaaatcctccattggcttccctttgcctttagggtaaagttcattttccttggcatcagcctcccttaccagctgatctcatgccctttcctccctccctcccctttgtattaatcactccaatttctctaactgaccaaagtctctcttgcctccaggtctttacaatatcatttattctgcttgaaaatgctctttcccattgtcacctcctgccccttctttgcctggctaattccttctcattctttaagtttcaacattgacagcctttctctgggaagcctcccctgactcttctacactaggttagctgccccggctgtatagcctcttttcttaacacattcttcacatttcattgcagcggttctcaactaggggtgattttttattcccaaggagacatttggcaatgtccagagacatttgtggttgctactggtgtttactagggagaggccggggatgctgctaaattcctaccatgcacagggcaggcccctacaacaaagaattatcctgttcaaaatgtcaataatgctgaggggttgagaaacccttctttactggaatggcttgtttacttatctatcattttcaatattaaactatttgtgagtctgaatcatttcccttatatgcccagagacagcatagtttcttgcaaggaaatattcatgaagttatttgtccatagtttagggctaatgattgctggaactgagattagggcgctggttccctttcccttattcagcattctttacattataccacagatgatatgagttcatgtcatttttgctcactttttcgtattcatttggtttgcatcatcaatcatttatcctctacaatcttattaattcaagatgtaaattaaatgcatttttaaaatgcaaaattctatgctagacactgggatgtaaagctaaataagacaaaaatgcctgccctcaagtcgctcaattttataagaaaaaataaggcaaagtttattttactgttgtgttaataattaaataatataatatgacttaaccccacatccctttactcattgtgtgttttaaaattagtatttaaatttgtaagcagtgaagtacaaattaaatattataaaaaccaacaaactctcagttaagggcggaagtacgctgagaggcctataaagatgaatgatgacgcaggaattggaagaagtcgtgtttgtcagctattaccaaaaagacctgttggaccatgtgatgttcaagacccttctacttctataattctatacaaataattagaaaataacatcctgggcttaatcgtggactcggttatctactttacttttgacactaaaccattcttctgacatttaccttcaatttagaggttagtaaaagcagattttattaatttttccttataagttcttctccgaaataactcctcctttttctccttttaaaaagttgataaatggaattgctcaagtcacatttgattctgaaacagcagtcaaagaactgtcatactacagtttagaagatttaaacaacaagtacctttatattgctgtaacagtcatagagtctacaggtaagtgtgtgtgtgtgtgtgtgtgtgtgtgtgtatactttcttttgaaaaatatttagacagaatattaaagatataaataatttccaatttctataattatttcacattgtattttctttcatagttaaatataattataagaagtagacttttatatagttataaaaaggcagtagggctctgcttctttttagtcattggacaagccattgggtccctattacctccacttctactgcaaaaatgggaaaacagtacccaattcatgtccaaagtagttctgcaggctctctgccttgaccatttggcaccctagtgtcctcacgtggtgaaaatcaaaaccaaaataagattatgtgtgtaaaactatttgataaagtactatacaaataaaagttattactattatcattattatagtctacataatgatggagtcaaactgaatgtttcctaaagcctaaagttttcaacattattttaatgtttcttctttttattttttcctcaacttattttaaataagttcagtttaagcagtatctatgagatatttaaagtattgccaaacagacaggcttgcaaacattaatgatgtatgatgccagcactaaagtggcttacaaattagcatcaggtataagacaggtgaagaaagaactgttgcaagaaagaattccatatgagctctaagcaaaatattaatgcaataggattcagaggaaggtgagcttctagatgattgttgagcaagcaagaacagtgttgtgaagatgatcagtcttgaaaaataattagggttttgaggcagagttgctagacagggtgaaatagaaaccctccagagagagggcagatgaagaagagtagatggtgaagcttaatctttgaggacagcagatcatccagtttggctaaaatataggatatgtatagaatgtattagagatgtaatattggaaaggagtttgggaatattaaagcttcaaatgttattcttaatagtttaacttaatctttacctggaggataacattattgggctcttgccagttgtctggtcatgtccccttccctccccctcccccctcccgctcccctccctcccctccccctcccctccccctcccctccccctcccccctcccgctcccctcccctccccctcccctccccctcccccctcccactcccccctccccctcccccctcccctcccctccctccctcccctcccgagtcttgctctgttgcccagactggagtgcagtggtacagtctcagctcaatgcaacctccgcctcctgggttcaagcaattctcctgcctcagcctcccgagtagctgagattacaggcatataccaccatgcctggcactttttttgttttcgttttttagttttagtagggatgaggtttcaccatgttggcccggctggtctcgaactccctttcagggttctttctatatcaagctccctttttctgatttctctctatgtatctatgctctgtgaacaccaacccccatcccccacctccacttctgtaaggctcagtttctggcctgacccttccctctctcctcaatcccttgaatacagtcaactgaaactcaggccactgatgaaaagtggtgtcccttcctggcatccttcctcagtccagtcctgtagctctacttctccaagggcttctctacatacgagcttgtgcataaggccttggaaactcctgaggtctaaactcttctctgctgtgcccctctgaagcaagacctatgtcctacttactactggtaaatgaatgaatgcaagaatggagtgagtgaatgaataagtctgtggagacatatagagatgaaatggatatccatacagatcatgatactcctaaaaactgtcaacatgatgcttgccatttccttaggtggattttctgaagaggcagaaatacctggcatcaaatatgtcctctctccctacaaactgaatttggttgctactcctcttttcctgaagcctgggattccatatcccatcaaggtagattgggtgagggggtagacgttgctacatatgatcatcttgttctgttcatggaaaacatgtgggtggcaaacagggtaagaatgttgccatgaagtcacagagggagcttattctgtgaaacctgcccctcctggtggacacagacagggatgggaaattgaaggtcagctgcagccttggcaatgacttcaaaagtgagggcaagatagccttgtattaggcatccctaaataagcattaaattacatgtaataaataagcattaaattatatgtaaataaaatctcataagactctagttcaaaaatacaaacatttaaaattatttggtggcaaattcttaaaaagccttaagatggagatatcattccttgaaaatagactcctttctctcactatgtttttgcctccagtgtgtctcatttgtttccctctgtctctgtgttgtctttgtgcataactctgttcaatctctcgtctctgtattgctctctgttcttttcatttttgcttctttccgtccctgaatctctttttttctgtcttttttgcttactcctctgcattcatttttctctctttcaccttcttttcctcctctaaatgctgacagtatagaattgaaacattcatgtggtttttagatttttatctatcattatatattttattacaaataatatattttattatgttgattaaatggaaatgtttattccctgcccttaatttagaaatccagagcaaaatttttttttgttctttgaaaatgtgttactttttaaaatcaacttaagtacaatcaaaatgtgttatttattatttactgtgggtcatgggcttttaagaaaaaaaaggatttaccaagcccaaagcaaggtttggacatgcttgtaggttcttacatatatatactatatatagaaaataatatataacaaagtatcatataatgcatatacagtaatatataatatatatactaaaatatgtaaatatagcaatattatatagaacataagcttaaaatatgtttatataaaagtaaaataacaaactatatctgtgtggaattgtgtgtgtatatatatatatatatggcagtgagaggtagatgttaaaggaaaaaaggtgtatctatttttgtttctcatattcaagggacttattcccagaagcgattgcctcattttctcctttatccagtcctaaaccaatcaaagaaatacagaagttagatagcagaagaccttatcacacctactccttgactgacttaatagaatgatatttatgttttgagtttgcttgatttatgggagaatctattcaagaatgatttaactaaatagaattaaatctttctataagctgagaatacacttctctttactaaattaaacataagtaaaccaggtgtggtggagcatgcctaaatagttccagctacttgggaggctgaggtgggaggatggcttgaggccaatagttcaaggttgcagtgcgctatgattgtgcctgtgaatagccactgcactccaacctgggcaacgtagtaagtctctgtctcagaaaaaaaattttcagaaaaaaatacataaataatttatactttggtggggaggaaggaaaattatttcagaattgtgctttaaaataagtgatgagctgttgaaatagatttggattgttttgacaaacaggtgcaggttaaagattcgcttgaccagttggtaggaggagtcccagtaacactgaatgcacaaacaattgatgtaaaccaagagacatctgacttggatccaagcaaaagtgtaacacgtgttgatgatggagtagcttcctttgtgcttaatctcccatctggagtgacggtgctggagtttaatgtgagctgaattctcctgttgtattttctaggacaatgtgtactcttgaccatgtgttttggctagtgtgcagaacagatgcggcagattttacacatgagtccagtgaacagttccataattttgcatccaagacaaattagtcccagagacaatctgctaatccattgaatggtccttgaggaagataaatgtatcaattttttatttgggagttaattgttttatcttacaccgttaagaccatatcagactctagaagcttcagaataggtatagcagtgcacatgagtgttaggaatatcctctcttcccccctcacttttaatcccctgaagggccacaaaagggtcaaaaatatggaagcctcccttttttctaactacagaaaccattctactttagagcccacttaatagtcttctctcgcagcaaatattatttaagttcccaatctcaaataaaatatgagcaataacatagtaacatagttacaaagtaacttagtaacataataacataggccaatgactgcagcatgcatatgctcactgtcatctattgagcacttactaaatgctaggcatcatgctgagagctttatgaagaatacatgaaacaccatttaattagcaagatgagttagaatattatctttgccattgtgtggctcaggaaatggaggcttctaacctctcttttgattaactaattttatccagagttaataagtggtggtactggtatgtgaaccagtgtgtacctgactccagagcatgagctaataacacttctgctgtctgagggtagatattgctgccatgatatcatttcttctccacctcatatttataagcacccatctgtgcctctacttcacaatgaaactgggccagatagtctctgagatgttcgttcatagctcctgtccccaagagttagtgctacctccccactacttcccttctcctacccccatttcctaaatgcttaggcatctctctgtaatcatcccatgcgaggagaagtcccaacttaccatgacatttcaggaagaccaccaataattattcctggagcatctttctctcttcatttcagacttttccgccatagcccataatcccatcattcttgtctgtagtctttgtaaagttgcttgacaccacagctgtataaacactgaagtaatggagggttttttcccctttagcatttgttattgtgaaatttagaaatttataaagcaaggaaaataatttgaaaggtatgttttacagaaagcattacatcacagtatacatgtctttttgaaatttctcttttcaggtcaaaactgatgctccagatcttccagaagaaaatcaggccagggaaggttaccgagcaatagcatactcatctctcagccaaagttacctttatattgattggactgataaccataaggctttgctagtgggagaacatctgaatattattgttacccccaaaagcccatatattgacaaaataactcactataattacttggtaagtacataatgatggatttacatcttattcccccacctggaacattttcctttgcctctagagaggcattagaattatcctttatacttttattcccaaagcactttcaagagcatcatctaacttgaacatcagtttctcaaaaaacctttgaaatagggcatgattttcatgaccatttcacagatgaggaaactgagggacagagaagttaaaagacttatgatggttactcagctgggaagaggaaaattttgatttgagctgaggactctgactcctgttctaataacactttttaccaaagagagcctagttattccaaagcgagaacctgattaaatcatgttgcctctgttctctttcatggccaaagattatatgcctagacccagttcggataagtgaattttattgtcaaaaaatggggaagcaaaatcctctcctgagaattgaatcctatcttgcctgttccaattccgtagctgagcaacatccctattgcatcatttatattaaacagaggtggatcgatgaagcctgttggtgaaaccaagaaaaaaacttacagaaaatattaagagcttcctgacaatcaccaaataaatggaatgaattatttcgacagccaggccaagtacatgctgttggcttttcaacatttttgaggaagaaattgaaaaaacagtaatgaggaccatagataaatattgactgataaagggaaactgtttatggactagataccaaatccatgtatgcagttctggtctctaaggacaatttaagggacctctgagggcattttggcttcacgtgattttttttttttaatcttaaaccttcaatttagaatctaaaccctggctttaaatccccaaataagatgcactccacttattcatctatttttttttaatcggtgaaacaaaaggggttttagtgacagtgtgatgactttgaacagtttttgggttcaaattttagctctctaatttactagttgtgtgattttgaattaaaatcagtatgacttttagtttctgagcctcagtttcttaaatgaggagaataatattcctcttattgatgtattgtgagaatgaaaggagttaaatacatgttaaagttcctggcacatagtaggcccataaacgttaactcactctttcttccttccttccttccttccttccttccttccttccttccttccttccttccttcctttccttccttccttccttctttctttctttcttttctttctttctttccctccctccctcccttctttccttccttccttccttctttctttctttccctccctccctccctcccttctttcttgccttccttccttccttccttccttccttccttccttcctttctttttggtggagtctcactctgtcccccaagctggagtgcagtggcatgatttcgactcactgcaacctctgcctcccaagttcaagcaattctcctgcctcagccttccgagtagctgggattacatatgcccaccacagtgcccggctaatttttttatttttagtagagccagggtttcaccatgttggccaggcaggtctcaaactcctgacctcaggtgatctgcctgccttggcctcccaaacttctgggattacaggtgtgagccaccgtgcccagccaaaattggtatgtctttttttttttttttttttttttttgagacagagtcttgctctgttgcacaggctggagtgcagtggcatgatctcagctcactgcaaacttcacctctcgggctccagtaattctcatgcctcagcctcccgagtaggtgtgattacagtcatgcaccaccatgcctggctaacttttgtatttttagtagagatggtgtttcactatgttggccaggctggtcttgaactcctggcctcaagtgatcggcccacctcggcctcccaaagtgctaggattacaggtgtgagccactgtgcccagcctaactttatttttctttaacataatttctgctccagctccaggctgcatcctaaagcacaggttttgtttttgtttgtttattttttacttattgttgctgctgctgtttatttttagattttatccaagggcaaaattatccactttggcacgagggagaaattttcagatgcatcttatcaaagtataaacattccagtaacacagaacatggttccttcatcccgacttctggtctattacatcgtcacaggagaacagacagcagaattagtgtctgattcagtctggttaaatattgaagaaaaatgtggcaaccagctccaggtaagccacaaattataagtcacaattgaattttcttttcaatgaaggaggctgccaaagttttagctgcttctgaaaagtcttgtctcatacaaatgatcttttcttttctttttcaaatgaacttttaggttcatctgtctcctgatgcagatgcatattctccaggccaaactgtgtctcttaatatggcaactggaatggattcctgggtggcattagcagcagtggacagtgctgtgtatggagtccaaagaggagccaaaaagcccttggaaagagttaagtaatgcatgtctcgctgcagtgttgcatgaagtgtggccaccaggctaggatatggaggaagaactaagggaagactaggcctgcttttctgtaatctactcaacatactcatttttaggaaggtaaaccatcctcctgtcagctcccaaagcacaggtcaatcctcttttgtttttcaaatgtaaatgtaagcactttaagaatatatgatcatggtagcaattacattcatggaggaaaaattactatcagaatactttggaggtttagggtagggtgttgatggcagttatagtagctagtagcagcacaggaaagacctgtataggtaacatttggattttttttaaattctcattgaaatccatagcacagaagaatctcaaaatcattcaattctcataagttcctatttatcttattatgttcagctattattttcgaggcttgaatgtctttgaacaaggaaggaaggactgagaaactgtaaaattaaaaaatactcggagaacgaataagcctgtccaaacaagtcttcagccatttagaacctagggacctccccaccaaaatgcacaaagttgtgcttttaaagcaacttaaaattaatttctatgttaattcagtccttcatgcattcatacctatttatttatttatttggaacattatattgattgcagcattcattctatgtacaaaacactatatatcagtttctaagaaactcctcatcaaagctatttgtttaagacttagttcttgatttaactttgaatagttatgtatttataaatacaaaaggacaaacttagaaacaaagttgggaaattttgtctttgatcatttgaaaaatatcatctgtgtatttcactggtttgtgataaccatgtaacaattagtaccttttagatctttagaggaatgatttatacatctcaatgtgctcaacattttgcctttctggacaggtatttcaattcttagagaagagtgatctgggctgtggggcaggtggtggcctcaacaatgccaatgtgttccacctagctggacttaccttcctcactaatgcaaatgcagatgactcccaagaaaatggtaaaatgctcagcatgtttattactgaaaatcccattgatcatttgccccccagatctcatttttatccttcttcccaaatattctgtaccctgatcttagaatgccaagactacataactcacctgtataaaatgtttcactggccttcaagataaagtacaaattctttagtgtagtactcaaaaccttccatgatcttcgccctggctctctccaactagctcttaccctgctgtgccttacgttatgtttaagctctacagaaccaagtggagttcttgagtggcattatgctattttgcacctttgggcctttatttattggaattggtttccccttcattagcctggagaagcaatgtaagaatcatcgcctctacgagacctcttccccacatagaatttataattccctcctcctttaatagggaggctattgcagggactagatctatttacaagttatagaacagcattgtgtcattgtgcattcttacatgtagttgtaagtcctgctcacctactgcatcaggagctctttaaggatagtaaccataccttaatcatcttctttctatggttttaaaattgttcataattatacttgatactgtggtattcatagttatatttgcaataatatagcacaaagagcaaataataaaaatagcatacccaacaaaagcatcactcactctaaatgcttaggtatttctctggaatcagtggatcagagaggctgcaggattcaaaaccaaattcagataaaataagtcaaaagatatgacactagatcatgaactccactaagataaaacaagtcatattaagaagtatggtgcacagttcctaatccaaagcagcccctcaatatttgttaaggaatgacttgtgaaggctctaaatacttaaatagtttcatggaatttttttttgagattttatctcctttttaatccttcttctttatctttttttaaaaaaaccagatgaaccttgtaaagaaattctcaggccaagaagaacgctgcaaaagaagatagaagaaataggtactgtaagattcatgtgattgtaaaaaggttatggtcatatcattcaaaaactggacaaaattaaatgttatataaattcccctaattgaaataaaatgaatgaaaagaaagatatgtatggaggtctagcttatctctctcagaaagattaatccaaataaagtctagtagttcatttgccatagccttaatctaaggaaataggtctttattacttcaagctctaaaatccaaaatattagcttttatttgtcataaatattttctctctgataacttcatctggcaattaaaatcatatccttccattttattctgacaaaatccatgatttgactattttggggatatacctagaagtctattacttctatttcatatatttaactgttagtagcattgttctttggaaaatacatcttgtgagaattattttaaaataattatttaaatggttatgataattcgtcatgttactgtagaaagaatatcaaactgggagtcagcaaattgagttcaactaatatcatgcctatggtaatataatagtttcttccatttgtatatgagttattttaattctaacctttattctaagttctaatgatatgaaaagagagacattgactaatctgagcacttacaatgaaggataatgctactaggtgaagtccacaaaccatgttatataagaagtttttgaaaaataggatattcagcttgaagaaggaaatatttgtatagtgatgatagccatcttcaaatatttgaaggcttcttggatatttaacttattttcttaaaaaacattttctattctttttctatatttttctgcatattttcagcagaacccaaagttccagtttcaagagttagtatttagcttaattgcaggaaaccctttaaccatttagtgtgagctggaatggaccatttggtaaggtcacattctccccattcttagaatagttccaaggggagtctggacagtcaactagccataactattgtgggtagggggatcatatagcaacagaaaccaggtatcccttgagattccttctaagcctgagatgttatcactctgcgtcatcaagagcacttgcattattaccatttcagctgctaaatataaacattcagtagtgaagaaatgttgttacgatggagcctgcgttaataatgatgaaacctgtgagcagcgagctgcacggattagtttagggccaagatgcatcaaagctttcactgaatgttgtgtcgtcgcaagccagctccgtgctaatatctctcataaagacatgcaattgggaaggctacgtaagtatgacattttctatcagaattctgctcaatatggggaattttgtgtaattttatgctgctaagaaaggcagttttcatgatctatttagaattgaaagtagaaaagataacttgtaaatgtccataagaaaaaaaaatccttcatttttgggcatccgaagaggtacagtacagagcagagtacactaggccagagttaagacctggcataaccttaaagccaagtcatcccataaacttgaatgattatttatcctctctgagcctcatgcaaggagcttcgaccagatcctctccaatatgcctgtgagttctacaagtctacgcttttgtgatattacaaccattaaaaattctgtctatatctacattgatgaaataaagcagaatatttctaaatctagcctaaggttaagtgtacttatataaaagctgatgtcttatttcagtttcaaccacaatacatgtttccagaatttatagaactctcattaacatgttttcagaacttttaggactttatatatagtctttttttttttttttttcagtaggaatctggctctgtcacccaggctggagtgcagtggtgcaatcttggcttactgcaacctctgcctctgggttcaagcgattctcctgcctcagcctcctgagtaactgggattaaaggcgcctgccaccacacctggttaatttttgtatttttagtagggacagggtttcaccatattggccaggctggtcttgaactcctgacctcaggtgatccgtccacctcggcctcccaaagtgctgagattacaggcgtgagccactgtgcccagcctatgtatagtctttaacaaaacaagcaaaagcaaaatgacagcttctgttttatacttatgtgtgctgcgtaatgacattttcatcaatgatggaccacatgtgcaacggtgatcctataggattataataccgtattttttctgtacctttcctgtgtttagatatgcttagatacacaaatacttatcattgcattacagttgtctgcagtattctgttcagtaacatgctgtacaggtttgtagcctaggagaaataggctatactatatagtctagatctgtagtaagttataccatctagattagtgtaagtacgctccatgatggttacacaacaaaatcatctaacaacatatttctcagaacatagccctattgttaagcaatatctaataaccataattttggtaaatggccacaaaatttatgtttgtagaaatatattcattgagatgtacagtgtctaagattcagattgttttccaatatttgttttgctttgtttgtttgtttgtttgagagacagagttttgtttttgttgcccaggctggagtgcaatggcgcagtctcagctcactgcaacctccgcctcccgggttcaagcaattctcctgcctcagcctcccaagtagctgggattacatgcacctgccaccatgcctggctaataatatttgcttattataagcagaattttaataaacagtctagtccatatgttgtttttctttttggagggaggatttggcttttttttctcttaattttttttaatttttaaatttatgtgggtaaatagtatttacggggtacacgagatactttgatacaggaatgcaataagtaacaatcatatcatggaaaatggggtatctatcccctgaggtatttctcctttgttttataaacaatccaattatactcttttagttatttttaaatgtacaattaaattattattgactgtagtcaccctgttgtgctgtcaagtactaagtcttattcattctttctattttttgtacccataaaccatccccacatccccctcatcctcctactacccttcccagccttctactctatatctccataagttaaattgttttgatttttagcacccacaaataagtgagaacatgtgaattttgtctttctgtgcctgacttatttcacttaacataatgacctccagttccatccatattgttgcaaatgacaggatctcattcttttcatggctgagtagtactccattgtgtatatgcaccacattttctttatccatttatctgttgatggacatttaggttgcttccaaatcctgactatttttaacagtgcagcaacaaacatgggcgtgcagatatctcttcgatgtactgattttctttcttttgggtatatacccagcagtgggattgccagatcatatggtagctctattctttgttttttaaggaacctccaaactgttctccatagtgtatagtaatttacattccccactaacagtgtacaagagttcccttttctccacatcccctccagcatttgttattgcctgtcttttgaataaaagccattttaactgagatgagatgatatttcattgtagctttgattgcatttctctggtgattactgatgttgagcaccttttcacatgcttttttgccatttgtatgtcttctttagagaaatgtctattcaaatcttttgcccatttttaagtgggattattacattttttcctgtagagttgtttgaactccttatatattcttgttattaatctcttgtcagatgggtagctgcaagtattttctcccattctgtaggttgtctgcttactttattgattcctttgctgtacagaagctctttaacttgatgtgatcccatttgtccattttggctttggttgtctgtgtagtggggtattactcaagaaacttttgcccagaccaatgtcctagagagttttcccagtgttttcctatagcagttttatagttagaggtcttagagttaaatctttaatcaatttttatttgagttttgtatatggcaagagataagggtcacgtttcattcttctgcatgaatgggataaccagttttcccagcaccattaattgaagagactgtccttcctccaatgtatgttcttggcacctttgtcaaaaatgcgttcactataggtgtgtggatttgtctgggttttctattctgttccataggtctatatgtctgcttttatgccactaccatgctgttttgaattatactatagtataatttgaagtcaggtaatgtgattcctccagtttttttctttttgctcgggattgctttggctattctggtcttttgtagttccatatgaattttaggattttttttctatttctgcaaagaatgttattggtgttttcatagagattgcattgaatcagtagattgctttgggtattaaggcgttttaacaatattgattcttccaatccatgaatatggaataactttccatttttttgagtgtcctcttgaatttctttcattggtgttttatagttttcattgtagaaatcttttacttctttggttaatttaattcctaggtatttaattttatttgtggctattgtaaatggtattactttttaaatttctttttcacattgttcattattgacatatagaaatgctactgatttttgtatgttgattttatatcctgcaactttattgaattcatttagcagttctaatagttttttggtggagtcctcaggtttttccaaatatgtgatcatatcatttgcatacaaggataacttgacttcttgctttctagtttggatgacctttatttccttctcttgtctaattgttctggctaggacttccagtgcactaggacttgcctagaaattgcagtccttgtggcctagactgcccctcaagttaacctagggccctagagcactccagcccatggtggggaggcttgctggaactcaagctccaaccactgggatgagcgatgcccctctggctagggccagtccaaatgctccctccatgggcagacaccagctgagtacagcctggttctgctttccaccgtgacagtgcaacactgagttcaatgcaaagccacagaatgactgcactctccctctcccaacacagagattctccatgctgcacagtcactgctaggggatgtgggaggagtggcattggtgcttcaagactatctttcctgccctcttcaatgtctctttcagtgatgtaaagtcaaaaccaggtactgtgattgctcacctgattttcggttctcttgatggtgctttttgtgtgtagttagttgttaaaatttagtgtaccaacaggaaagacaaatggtgtaggcttctattcagccatcttgctctcccctctcatatattttttcgtttttcaatttttcaactataatcatctggcttggcttcagctggatagaagtctctctctgcagccccctccttcctggaactctccctcattccagacaagttggccttgcaaaactcccatcagtgttgccacaagtcttcaaaatcatcaggctctgcttgtattcctctccctgccctagtctgtaaactgcctctaggcagtaagctggggcaattttaggtttcacctaattgtttcctttctcttagagatcacagtcttgcttatgctctaatgtctgaaaactgttattttgcatatcatgttttgttttctattaaggcatcttatatgaaaacagaagttcagtccatttttattaaagtaaatataaacaaattaccaagttaaagaaggcagagaaccatataaagcctccttttttctaatataaacacaattattacaattatatatataagtgcaaataactttatagactgatcgatatcttgtataatctcaggaatactaaacatttagcaatttaagaaaaaaatcattaaagatatttaatgctttgttttgccaatgctattagtggaaaaatcctaaggcctttatagtttgtttgtttgtttgtttgtttgtttgtgacagagtctctctctgttacccaggctggagtgcagtggtgcaatctcggctcactgcaacctctacctcccaggttcaagtgattcttgtgcctcagcctcctgagtagctgggactatagacacccgccaccatgcccagctaatttttgtgtttttagtagagacggggtttcaacatgttggccaggctgatctcgaattcctgacctcaggtgatctgcccacctcggcctcccaaagtgctgggattacaggcatgagccactgcaccctgcctataattctattttggaagcattaaacaaaatgttttatttacctttcagaaaatgcttaagttacagattaatggccatattttaaaattcacctataagtagaatttatattgtttttccataattgaatatgatttttttgtccagacatgaagaccctgttaccagtaagcaagccagaaattcggagttattttccagaaagctggttgtgggaagttcatcttgttcccagaaggtattatacttctttcatgtttccttgaaagaaatgtggataatgcaagtattatggccaaaaatctagaaactacccatttcccaatagcttgcataggagttaagatgatcctgcaatttgatcaaattttgttttgttttgctttgcttttttaaatttttatttttttaatatacatcgtactggtgattggctccaggtcagaatgaagaagggtgctattccatttaattttatttgacttcattatgcatttactacacacaactatgtgcgatacactatattaagccactatttttatcctaaaatatctgtactataaaacaaacattaataaacaggaagaaaagttttctttttaaagttttctattcaacacattttaaggaaacacttcctctataccactgaaaacagtgatgggctgagtcctcgagccatactcttcttagatgggcttaaagcactggttttccaatgagaaggcaaggaatgagttcaaaggcctgcagttgtctcctcacgcatctccttatttctacccttgtcttctctaatccttcttccacacaattgtccatttcatctgacattacccattagctagcatgtcctctagtaaaccttctggccactgctccccacactaccagtgattggattaattgcaccctcaattaaccctgttgtgtgtatcatattgtattataatgacttgtttactttcctgtcttccacattaaaatgtaaatacctcaaaggcatgaactaaattcagattactgttttatatccaggacttggcctaggatactgaaaataaatgtgttgaacgaaagcacactgcctctgaactcttataatgccttattggtacaattattacagtgcagtgtaatttatttacttaactatttcttccactagattgtaaactgcctgagagcaggactgtatcttatcagtgctgtttactcagtactcagcactatacctgatacaaagttggtagacaatagctgtaaataaatatacaagcttaatcataatcagcagtttttagttatgtcaactttgttttgagcagtgctaacatgcatcactttgcttccctattttagaatatactcacaacaaacatctttttctttgtttgtgtgcttggattttgcaatgtttcaaaggcattcttctgaacttgaattctcatcatagaggtgcaatgtctaaaaacatgcaatatataagagagttactgaatatatttttcttgatgaggttttccttaatgatgtgatttcatctcgtgaatttttttctttctctaaagtagtttgaagcaaaaattctgttaatggatgtctctgttaagttgggttaatcaatattccactgtatttgaatatcaacattttaacttccagaaaacagttgcagtttgccctacctgattctctaaccacctgggaaattcaaggcgttggcatttcaaacactggtaagcaggtttaagtgatatatgcatttaaatagtgatttgattagcaagatgtaattctttgttagtatctatttagtttacccaggacttaaatggtagcaatttttaaaaaatattcttttttttatgtattaccaaaagacttggatatacccacatctttgaacatattgatttctcctttcactcctctcttttttttctttttcctttttttgtaaatgaagaaggggtctcgctatgttgtccaagctggtctcaaactcctagtttcaagcaaccttcccacctccaccttccaaagtgctgggattacagcttgagccactgcacccagcctcaagtctttattttccttcacttttctcactgactgggagcttgtgtagagttagaaacaaataaatgaactctcttgggctgatctttatgatgattaagtgcagatgctttccaaatagcttcaggaatggttttgtttgtttgtttgctacttttgttttaaaatcttggtttccacaatcaaaattttatactcattaaacatggagccaataatgaatatctaaaaagatttggtgtgttagttgataaacattctcatgccttaaatagaattaactatttgttgaataaatgaagttttttgttaatactaattattattgaaattaagatcaatgaatagaaaattcaaggacatgagttgagagttcagagaaaaacatgatctaatattattttttccttgaagtaaagcaaatgtgagaaattttaataccaataaaacattataggaatttcctaatatgattctactttgcttccactttgggctgaaggtatatgtgttgctgatactgtcaaggcaaaggtgttcaaagatgtcttcctggaaatgaatataccatattctgttgtacgaggagaacagatccaattgaaaggaactgtttacaactataggacttctgggatgcaggtaagtaggtgttaatatttatgggataaaggaaacattctctggttttctgagaattctattagtggaattaccatacacaaaaaagtagaagttcaactcagttcagcaatagaaaccaaacacttaaaatgagcattgtactatatgtgtagggatgtgaattaaagggatgaaggaaggaggaaggacaagtaggtattcatgtaacttcaattgaaagaataaattgcataagataatccatgtgctgtggaagtccagagaagggtgaattcatctttagttcctttatttgcctatactcagagttccttgatttccttgattctaacaaccctttcctccattttagccattcatactcatcttcactttatagatcttatcatcctctctgaaatcttgatttcagacattcacatctcaccatccagtgacaacctccttcctgtcctcctaactcattaaccagattacttccatagctctgggtcagtagcatcactgaaaccttcagtccattgactcaatcccttttattgtcctttacttccctgctctttttactttactccttgttcagattagaattcaccagccatcattaaaaccacactgactaaaattatgccaactccctggatcctatctcactccaggacacaattccaaccatgattggacccaccatttatcttctctttgccagcacacccctaaagagaattatataataggctgactgatttgatttgaaaatcacagtcacaaaactttgcatgagaattcaatgtgttccaaaattctagctatatttttttaaaacactaactttattcttagagattagaatttcagtggtttcctaaaattttgcttacataccctcttgttttggaaaaactatgtatccctctgacacttttttttttaagacggagtctcgctctgccctctgacacattttaaaattggcatctaaaatttttatcatacattttttaaaagatggcaatctattacttttaaaatatttaaatattggtatcttaaaataaaactgttttatcaaacttatgtatagcagactccaaataccatagcaatcaattttttaaatgctcaaataagcctttttttttcaagatggggtcttgttctattgcccaggctggagtgcagtggtgcgatctccgctcactgcaaactcctcctcccctgttcaagcaattctcatgactcagcctcctgagtagctaggattacaggtacacgccaccatgcttggctaatttttgtatttttagtagagacaggtttcgccatgttggccaggctggtctcgaactcctgacctcaagtgacccacctgcctcagcttcccaaagtactgggattacaagcatgaggaactgctcctgggctcgaataagctcttagcaacagattacatatcattccttttcctcaatgaattcatatttccattttactcccctaatgttacatattttatgcatgaatttttttctgttgatcaccttattatactttaatgaacaaaaatatgcacatacattgaaaatgaaatatcttaaaatttcatgattgtaaaattccaagtatcaaatgatatgtggatttaggtatcattacaaatattattattagtatactattgataaaataacatatttctaaagttattaaatatagaaataaaattttatttaaaaattctcttctcggccaggagcggtggctcaggcctataatctcagcactttgggaggccgaggcgggtggatcacgaggtcaggcgatcgacaccatcctggcaaacacggtgaaaccccatctctactaaaaatacaaaaaagttagccaggcttggtggcaggcgcctgtagtcccagctactcgggagacagaggccggagaatggcgtgaacccgggaggcggagcttgcagtgagccgagattgcgccactacactccagcctgggcgacagagcgacactccgtctcaaaaaaaaaattatcttctcattagataaatgaaatttttctctcaattggcttaatagttatggataaatgttatttattgttagaaatgagagagagtttggcataaattctattcttatttttcatttttatagaggtaggcattgctgttcaacccaattttatcaggaaggttgataaaataaaaatattgtcaattttattacccctttatcaatatattttaatcttatatcttggagcttcacatttagcttattcaatttatgtaatatgtttgtcatataatctaactggaaaaatcagtcctcattgataaaatgatcagcgaaaatcagacttactctttgtcatagaaatgccaatttcatttttcaatccaaatcatgttaagaaatgtcactctttttttcacaattttaattttcagtaaaaatgaacttttccatataaacttgtttcatcaggtaacactaaatatcagagaatgcacacacaaattttacttggccacaggatgtaaatggggaataaacttaagtaatcagaatttaccatactgatggtattatcttttttttttttctttttttgagacagagtcttgctctgtcacccaggctggagtgcaatggcacaatctcggttcactgcagcctccgcttcccaagttcaagtgattctcctgcctcagcctcctgagtagctgggattacaagcatgtgccagctcgcctggctaatttttgcatttttagtagagacagggtttcaccatgtggtccaggctggtctcgaactcctgaccttgtgatctgcccaccttggcctcccaaagtgctgaaattacaggcatgagccactgttcccggccagtattatcttatttttacagaaataaaatcaaaatgttactcatttctcttccttagaatttactcacagggtttgcataaatcctatgaatcatgccaccatcttcagccctgtggaattgccctccctcatttggctccatccccaccaccctaaatacaacgtgaagagttggagaaggaccttgattaagaagctgtaaagttgcctttacattatttcttttaaacccactagcttttctgcagacagaatgcttcatgaatttaagataatcataactcagatagagataccaaaggccatttctccatcaggttcctgtagtggttttcatgtctcaaaatcctgattcaagatgggcttgaggcttggaaactgagatactaagacagtcagaccatctcatcaaaacagactcagcataattttataactcacactgatcttggctaccaaaggattttggtagatgattaaggaggtgtcactcttaaaccatgtaaattgtaatttgagatagacacataaataggtggccataacagatgggtaaggcacagaggccacagccaaactctgctcaactgtaggattgagatcagcaagggctcctctgctcacctagtcttagacatataaaatcggcttgtgtaggtatgtgtgtatatatatatatatatatatatatacacacacatatatatatacatatatacatatatacgtatatatacatatatatacatatatacatatatatacatatacatatatacatatatatatatacgtatatatacatatatacgtatatgtacatatctacatatatacatatatgtacatatctatacatatatacatacatatatatatatatacacacactgcctcagcaatttgtgtttccaccaataatattatcagagacatcctttcatatcagtatatacagatttacttcattactttaatggctgcacagtaattcacatggtgggtatactataatttattgaaccatgtttctattaaagacatttgggttgtttacaggttttcactattataactgattttgcaaagtctgcatttatgcatacatatcttcctacatgtatatttctgtaggatagatgttttgtcttggagtgaactaactgggctaaagggcatggacattttaccttctgataataaatattgccataattatcttccaaaaggattccatcaattgacattcttaccaagtgtatgcaggtagccttgatccctcacattcttataatttgggggaataaacattttttcttttattcatacaatgaacacttatacagaaattgaaatgaatggactagataactacatgcatcattttgattaaagctcaaaaatgtaacattgctgaaaaaagcaaattgcagaataatatgtatacacaatgaatacaactacataatatttaaaaacatgaaagaccgcgctatatattgtttgttaatacacataaaatttttgccaagttgacagacacaagtgatatgtcactgatgtttctatttcactaccctgattactagcaatgttgaacctcatttcatttgtctgtggccatttgtatttcttctttcatgtattctatgatatcctatatactactttaatatcctttcttttgctttccattgagttccttttttctggggtaagttacctagcttcttcttgcttagtttcctcatctgacaaatgggatgataatagtatctatttcatagttgaagattaaatgagctaattcatgtaaatatagtacttggcccatagtgagtactcaacaaatgtacttattattgtttacaggagcactttgtatgttagagctataaattctttattgattataaatgttgctggtatttaatctgctacttgtctttaactttgttattagtgtttttaatttgtatgttataaaatctgtagatcttttcctttatgtcatttgagttttgtgtttttggaaatcttttctcactgcaagttttaaaaacgtttttctacaaaatactgcatgttctcacttataagtgggagctaaacattgagtatatatggacacaaagaagggaacagcagacaccagggcctgcttgagggtggagggtgagagaagggtaaagatcaaaaaatgacctattaggtactatgcttattacctgaatgatgaaagaatctgcacaccaaacctctgcgacacgccatttacctatacaacagacctgcacatgtgccccgaacctaaaataaaatgtttttctaaagaactgttttttctatattttctatagtacttttatagttttttgtgagcatttagatttttttatctgaaataaggatctaatcccaaatagccagatgatccagcagtatttgttaaggaattcatgcttttccaactgatttaaaatgtcatcttgcccccatatatattgaatttccatatatgtggatctatttatagattctctcctctgttttgtttacatcagtatcacactgatttaaagtaccatagatttgtggttatattgtataactattaggcaagtactctctggtattcttatttttcaaacgtttttgatgttgttattcttacacatttactctgccagataaactttggaattagtttgttgaattctccttttaaaattataatagggttttcatattgtcctgaatttatgaattaatataagggaaattgacttgccatattgaatcttttacatctctttatccttttgctttatgaactaaatcaagggtcagcaatttatggaccatgggccaaatctagcctgccatctcttttgtatgtcctttgcaataacacaattatatataacttgacagcattttttttttttttgagacagagtctcgccctgtcgcccaggctggagtgcaatgggaagatctcgggtcactgcaagctccgcctgccaggttcaagcgattctcctgcctcagcctcccaagtagctgggattacaggcacacaccaccatgcccagccaacttgacagcattttaaagtgtcatgcatatcactatactgccatattttatttaatctttaaattttcagtgcatttccatcatatcaaaataagaaacaagtacatctgtgatattttgggcttagttcctgttaattacctttcctcctgagtgtgggttacactttcctatttctttttatctagtaattttggattgaatcttctactttattaataaaaatattataaagactctggattctattacattcctctgaagatttttcgtgtgtgtgtgtgtgttagcaggcagttggctggattcagttccagactctgaaatctcagttcagtatttttagccttagctggatgctagaaatctgtgctgtgcataggtcaagggtcagccaggtttgagcaaggattatacacagaacttggagttccttcactattcagctgtggtaactattccctactttgtcctctagttcctaaaccagtatgatgtcaggttctactggggttttagccactccaaggcaccaatgggacctgccctcagggtaaagctataaaaagcgggacacttattcagtgtcattcccttctcccaagtgtcactttccctcccactctctagtatctgcaggtagtttgttttaatatgtatcttgtctagagtttgtggttatttttacagaaaggttgcccaatataagctatttggctattactgaaaccagaaccacttttttttttatattttctatcagtttcaaaagttccttttagtctcaatttactaagagtttttgtaatgcaattatgctgaattgtattaaatgactcttctatatctatccttccccaccctcccctgctgttctaaggaaatcattggccgcaggtgatccaatagtcttttgctctggcttctcccaccctggtggttgtctcccaagaagatagttaagaaggaaaaggaactttctgttttcaagaaattcctcaaaattagtggttgaatagctggtgctctcttttgtttacctgcttgacttattctggattttatggatttattattttgggtatagttctcaattctatcagttcaccagaatttggagggaagatgaaaaatgtttactatttgagccagaagtcagtgggcactattattattcccattacaaagatgagaaaatggaggattagagagttcatgcaaccagtttccatcaccagttaataagaggaatgccaaaaattgaatccaggtctttctggagccagagtttggttgtaaaatggggtacaaatgggaagttgataaaattagaaaagtaagctggggacataatgggcagggccttgaatgccgatatagggaattttcagtctttgatgaaacccatcatttactgaataccagaggctgagctaaaagatacaaaaatgaataagatgaaaatgaaaaagtacctgagcctaaggctcccactatctgaaacacaaacatgtaaagagacagggtaataagtgctatcacaacagcatgagctctgtacccaatttagtacgtaacagtctaagaaaggtaagatgtttctgagacagtgttgacttttctagacatctgtttgcattgctaaactctacggcaacttgtgtgtctatgttaggaaatctgaaatgaactttcttctgtgccttagaatctaagggattattttaacattgttaaagtggagagtttgtgtccagacaagcataatcaaggtcaacttttttagagataaagtatttcgagtctgggcacggattacagcatcatgcctgtaattccagtactttgggaggctgaggtgggcggatcacctgagatcaggagttcgagatcagcctggccaacatggagaaaccgtgcctctactaaaaatacaaaaattagctgggtgtggtggcgcatgcctgtaatcccagctactcaggaggctgaggcaggagaattgcttgaatccgggaggcggaggttgcagtgagctgagatcatgccgctgcactccagcctgggcgacatagcaagactctgtctcaaaaaaaaaaaatgtattttgatataattcttcacttgtatttcagttctgtgttaaaatgtctgctgtggagggaatctgcacttcggaaagcccagtcattgatcatcagggcacaaagtcctccaaatgtgtgcgccagaaagtagagggctcctccagtcacttggtgacattcactgtgcttcctctggaaattggccttcacaacatcaatttttcactggagacttggtttggaaaagaaatcttagtaaaaacattacgagtggtggtaagaaaaacatgcttcaataacttatgcttaaattattgcaaaagagagacacagaaaggggggggagagaaacaatagtgtaaatttaacgaaacattaagcattaaggaaactggatggaggttattccagattttttttgtactattcttgcaatttttctgtaagtctgaaatcgtgcttaaaaatttttaataaaacaatatttgtttcgtagaaaatataaaatactgaaaaacgacagataaataaaaatcatcaataattcccatacccagagatatctaattttaacaattggtacacgtctttttttggtatacaggtacaattggtacacaggcttttttttccccttaatacattcagaaaatgtgtcttgaaatctatgtgccagacattatgcaaggaactggagataaaacaataaataagacatggcccttgaatttaaagaacttgcagtctagaaaactttccattgtataaacaaataaacagtcccaaaaaagaagaaaagtataatttgttaagtacaatttacccacagtctgttaattgtattcacgctattaacattaatatttttatgtaattttaatatttttatataattttaatattttatataagtatgatttaccaattaaaaataatagtacttttaaaggactaagattcttgctaagggtcatatggccaattaatgacagactggatttcctggctcttcactctctgttttcagctatgaaattcacttcagtaaacatgtaccgacttattttgtgcaaagcacattcccatgcatccttgcactgtggttccatgcagtctctggagcgaggctgctgggccttgaatcttggctccatcacctcctagcagtgtgacagtgttacttgatttccatgtgtgtcagtctcctcatctgtcgaatgggagtaataacagcaccaacctcatagaggtttttagaggttaaatgagttaatacatataaagcacttagaacaattatctggcttataaataacttctttttaagcatttgctctggtcaatatgcaaatagccataaaatcttattgctgcttatatccatgtaagtatttatacatagtttgccttttccaagaaaaataattttttagtttgaaaagtggtccagaaaagttgatccagggaattcaggttatataaacttatgtttttaactgaatgttttctgcctttattttagccagaaggtgtcaaaagggaaagctattctggtgttactttggatcctaggggtatttatggtaggcaaaatgattttttattttatatgttatcttttgctttagaagttaaagtgtgtatgtaacttaaaacactatttttcagaaagtgaattgtctaaaatcagtagtatccacttctggccaggcacagtggctcatgcctgtaatcctagcactttgggaggccgaggtgggtggatcatttgaggtcaggagttcgagaccagcctggccaacatagtgaaaccctacctctactaaaaatacaaaaattagctgggcatggtggtgggcacccatagtcccagctatttgggaagctgaggcaggagaatcgcttgaacctgagaggtggaggttacagtgagctgagatcgtgccactgcactccagcctgggcgacagagcaagactgtgtcaaaaaaaaaaaaaaaaaagtatccacttcttagatcactatctttcttgatagcattatagtacaactactataatctgaatgactgagacacaacaataataattccattaattttgaatgcaaggccttgaaatagtaacaattgcatgacttccctcatatattattcattgtctatccatcacaataataatttataatatattattattgagccaacagtccaaagaacacctaagaaaaagtcatttacataattaacatgcattatttgaaaacataataatgctaattaatcactaaacaaacccattcctcattgctcctgcttccctacttttccttcaattgagatattccaaatcttctcaaagctagaattttgcaaacatttgagtacttaatcaaggcctaaatacatatacatgtatttatgaaatttaggatgtggccagttaaccattctcttttcaactaaagaagacagattactgcagttcttattaaatgcttacaacttatcttaacgttgtatcaataatttttgttttatttcaatgatataacaatggggaaaaaatttacttacagatcatgatcactatcatcagtgtcatttcctctgggaaagcaaagaattaataccctttacactttaattcatctgagtatcatgaactgaggagtgttatttcagtagagcaataaaaagtaaaatccatctatgtacatgcgtccacatgcttacttgtttctccaattttttcttcacacagacctcctccttgcctgctcattgtgaatgatctatgggtagagatattacaagtttcaagggttttagcctcatgcaattatatcaagcctcaaaagccactgtgtccttggcttctctttcttttttttttttttttcaccacagatgcttcttctgctgacattattgcaaacaattttccagagcagtcttgccttactcatcctaggtgtgaacatcaaggccacaggataggaacaatcttttatctgggaataaatctctgtagagaaaatctgggttaaaacaaaaatctgtgcctctttccaatcttctcatatgacttttttcccttaacattttaggcaacttgggtttaggcagctttcctgatttctgcagagctaaagagggaaaagataaaaattctgttcagcttatttcagatattttattaaatacttctaatatttattattttttttttgtggggtggggggacagggtctcactctgttgcccaggctggagtgcagtggcgccatgtcagctcactgcaacctccacctcctgatttcaagcgattctcctgcctcagcctctggaatagctgggattacaagcactcaccaccatgcctggccaatttttatatttttagtagagacggggttttaccatgttggcaaggctggtctggaactccttacctcaagtgacccaccagccttggactcccaaaatgctgggactacaggcgtgagccactgtgcccggcctatttctgatatttatatattgaaatcgctatacaactatgatactttacagggttcagttaaaaaaaaatgctaaaaagtgtttggaaaaataaatggactataatgttaaaggaaatctgaaaaaatatatcaatgagggagaacaaacagtatatagtaattaaaattgtgtgacaccagcttaaaaaaagactaaacacagagactcaatgcttaagactagctctagtctttagtttctgctttctgtccctgataagcccttttctcccaactcgtctcatatctcaaatgcagagtgttaagtttctcactccctcatttcctgacacaccatcctcattggtttaggcaggcccctctcgttttattttttccttcatcccggaccccattcccattccccttcctccaagtgtacccactcaaatgtgtttgctgtatacttttgaatagaaaggtaatgttgttttgtatgtatgtacctctttaatctatgtatatgtaacattgtgctatagatcctattctgtcttaagttgttacactcaaggcttagttttaaagaaatatctcggccaggcgcggtggctcacgcctgtaatcccagcactttgggaggctgaggcgggcggatcacgaggtcaggagatcgagaccatcctggctaaaacggtgaaaccccgtctctactaaaaatacaaaaaattagccaggcgtggtggtgggcacctgtagtcccagctactcgggaggctgaggcaggagaagggcgtgaacccgggaggcggagcttgcagtgagccaagatcacgccactgcactccagcctgggcgacagagcgagactccgtctcaaaaatatatatatatataactctattgttataggtatacttaattcatttttcttacatagaatttcagagcatgttccctcaccattttatccatcactgtatatacaatatatttcccttgaaaaatccatgttagcatttacctggaccatatatccaggagctgggtcaaaggatatatacatatttaatgccatttagtcctgtcatattgcccttcagaatggttatacttccattagcagtgcacgagggttctcgtctctccacaacctcaccaacacttgcctctctaaaatgtggcatttttaatgggtataaagcactatctcattattgttttaatttggattcttctggttactaatgattttaagcatttcttcatatacttgtccatttgggtttcccatctgtcaattgcctattcatatcttttgcacgtttttaaattttctatttgggttatccttttaaaatttcttcttgattttgtctctgatgtacctctttgagcaacaacaagccttcatgggtttgaaaaggaattatttattctgatgtagtcaaatccatcataatttcatcttatggttatatatttttgaggtaatctttaagaggtctttctctactcttagttcacaaagacattgctggatattttattctgttaattttatagatttgaatttaaaatgttttaatctgtctggaacctgcctttttatgtgatgtcttgatgagtcttttaccgtgatcactgatgaggaataaaattaacttctcttagttttaactttctctttaccttttccacctggtagtagagttgccaatggaattgaaatagtcaagagcaggtttcaatggagaaaatggtgaaggagcaaatctagataatctcaaggctatctgtaataagtatcatatattgagcatgaattgtatgccaggctctttgtctatattatttttatcccacaaaaatcctttgaggaaaatgttgttatctccatttaactgatgaacaaattgaggctaagaaaggttgtatcttgcccagcgtcacatatatactaagctctttttgaacttcatgctctttcactcaaagtgcaaacctcttaaatgtcttctgaattttattttgatatatcctctgcatttatcaaggattaatgaagaaagaagttttatgaggaatgttcctgcatttttaggaaagccatgtggcttgtccattaaattgcaaaatgtgactcatttttctttagcatcttccatatgccagggtctgtgctaagtgccaggactacagctggaatgagaaatgattcctgcccccagagtgctttcttagcaggacaatgggaggtggattctctttgtggtgactagtgtgggctctgcagcaaaacttctggagttcagattgcagctccacttgtattgtttctgggaccttgaacacgttactttctaagcctcaatttcctcatctataaaattaaactaatgaaaatagacctaacatagaggactgttgtgagaatccaatgcaataattcatttaaagaacttagtagcatgcttggtactctatcagtagaatgatcaatgttacctttttttggacataaaccagtgatcacagtagaaaaattatctgataccagtatgctaaaactctgttgttttgcccatagattaaaaagtatcaaaactagactgggaagggaaggtggaaagaatttcagatcatacttccctgtggagctaatgttcaatatatagttgattaagaaattacatgttagttattcttagctttcagttccaggaacaattttctgtctttgggcaagctggcatgctatattttgctggtgaataagatttatataacctatttatttcacatcttataatgaccaggaagcttacagccaaatttaatgctttatttaataagattatacaagcctagggtttgattaaagtccttgatgatttttaactttcttttaaaattttaatagtctaattataagtcttttattttgaaatattctttggaagtagatacattataaataatctgcaaacagtcttcccctggaaactctgtataaatccaaattttctaaattacaggtaccattagcagacgaaaggagttcccatacaggatacccttagatttggtccccaaaacagaaatcaaaaggattttgagtgtaaaaggtaaattaacaaatgccatttttatttctcatttcacttggtgcttcaaacaaaaatcaaatatcctcatgattattctgtttctccacttccgtgttcagtagcacacacaaatctacctttaggagtgctccacccctacccacccccactttcaaacctttaatcacttttcccactatcttcttccaacggcctgatttacatggagatgcattctcctccaatggaaggtagggactgtcattggctcaaagatgtctctaaaatgggggtccagttgcttctagacttaaagaactttccatggtcttagtggccagtcccgctccagagaaggcctatggcctgcacatggcctagcgagaacagcactgctctgctgaagtactggtcccagaagggttgtcttagtccatttatgctgccataacaaaataacaaaatttataaataatacaaatttatttctcacagttctggaggctgggaagtccaagatcaaggcatcaagagattgggtgtttggcaagggctgctctctgtttccatgaggatatatgttgctgtatcctcctgtggcagaaagtggaaaggcaaaagggcaaaaaggggtgaagaacttcctcttacctcgtctataagattattaatcccactcattagggtggagccatcataacctaatcacctctcaaaaagccccaccttctaatactatcaccttggtgattaggcttcagtgtatgaattttggagagacatatacattcaaaccatagcagggattctcctcccctcgcatacatttgcagaagtgatatttgcacaagtgactaggttttccttagtctccaggctttacaattcaataacatattaccgaatgatagaatgtcctgactacattttatctcagataaaaccctagaatcacaaaatgttagtactggaaaggatctttttgatcatgtgcaaccctgctgttggatataaaagaaagtggcatgtccaaggttgcacagtgaattatagacagtcatgtcagcactccctgttcaggctctttgctttgcttcctggaagggattggtaaatatggtttataatgtctaaagctaacaggttgaatggcaactaatttgccatgttctcttgcagcaatcagtccactgtattacattacctaccaccatattttagtgatttttaaagtcttttttttttttgtttctttcaaattcatgttcctaaccggatctttttttctcaccccgtttctgagaagcaagtcaactgcctagataaaaagggaagaaccatctctagatggttgttcttctctcttgagaacatactgttagaagttaataaaaagcaatgtgtctactttgatcttttttgtttcaggactgcttgtaggtgagatcttgtctgcagttctaagtcaggaaggcatcaatatcctaacccacctccccaaagggagtgcagaggcggagctgatgagcgttgtcccagtattctatgtttttcactacctggaaacaggaaatcattggaacatttttcattctgacccattaattgaaaagcagaaactgaagaaaaaattaaaagaaggtaaaaaaaaaaagtatttcacataaaaattgggtgattctaaactaatatttttattaaactaatatttaagttgtgaattatagaaaactttgtaagagaattttagcaaaaaaatcatgagatggactctactatataaataaatattatttctgtagcattttggctcaacttaccaaaatgcctgaatgagaggcaaggcacctgcattccaaactacagaacacttccttccttttcgaatgagatcagaatgttctacttgataattcccaattcgagcaattcatatacttcctttgagaagttcaatgctggccacagagcatatgcttgctgcccaacaccaaaggaagcttaccattctcagggcctgataaagtgttctttgagtagaaacggaggtctgttaagcaccgtgttctttttcttgtgcttcttagggatgttgagcattatgtcctacagaaatgctgactactcttacagtgtgtggaagggtggaagtgctagcacttggtaagtagaagattttgagttgcattttcatatagtggttaattaactaaagaataataaccataatggaaactccattcctccagttgctcaggctaaaagcctcgtcatccttcactcctctctttctcttaccgttcacatctgatccagcagatatggattcaaaatatatccttaatttgactacttctcaccacctccaccacactatcctgttccaagacaccttcctctcccacctggattcttacactagtctcccttagtcttctgggttcagcccttgatcctcttcagtatatactcaacacagcaactgaagtgaccctgttaaaacatatgttagatcatgccactcaaaaccatttaggagcttcccatcttacccagagtaaaaaccaaactttttattgtgatttacaaagctctgtatgatctggctccacctcatgtctcctactttatctcctatactctctttccctccaattcagccccactagccttcctcaaacacaccaggcatgcttccacctcagggcctttgcactgttttctcagtctggaatactcctccttaggtgtcagcatgactggctctcatatttccctcaggtctttaccaaatgtcaccttggggaggcctctgctatatcataatgtctaaaattgcaatccactcccctcccaacacctcatatcgtttcttttctcctcagtgtgattactaacgttcttgcttattccactattgtgtatctcccccactggaatataagctccatgcgggaagttctaagtatccctagtgcctggtacctacctggcacatagtagatgctcagtaagtatttattcaatgaaacatatcttccaaaattctgatgatttgagggaaagatagtctgaattaattaagagtccatatggcagtctattttcaaaaaataccggctgggcatggtggctcacgcctgtaatcccagcactttgggaggacaaggcgggcggatcatgaggtcaagagatcgagaccatcctggccaacatggtgaaaccccgtctctatgaaaaatacaaaaattagctgggcgtagtggcatgtgcctgtagtcccagctactcaggaggctgaggcaggagaatcacttaaacccaggaggcaagggttacagtgagccgagatcgcgctactgcactccagcccgggtgacagagtgagactctgtctcaaaaaacaaaacaaaacaaaacaaaaaaaccatcatgctatgacaaaatatttaataaaaacggtgtgccagctgctttgtaggttctatatgaaacatatttaaggagtttacaacctagaatactttaattttagatttttttcttttttcttttttcttttttttttttttgagacggagtcttgctctgttcccaggctggagtgcagtggcacgatctcggctcactgcaacctccgcctcccgggttcaagcgattctcctggctcagcctcctgagagctgggattacaggcgcgcaccaccatgcctaatttttgtatttttagtagaggtggggtttcaccatgttggccaggatggtctcgatctccggacctcgtgatccacccacctcaacctcccaaagggctgggattacaggcatgagccactgcgcctggccagttttttttctttagctattgagatctcccagaattttatctttggccctcttattttctgtaatctcccctggtacagtctcattattgcccatgatttccataacatctaggccaatggccccctaatcaatgtctcaaggcctaacttctttcctaagaagttaggaaatgtcctagatccatatttctaggtttccggaagccaaagatccttcaagcacaatatgtgccaaattcattattttcttcctcaaatacacttctgtttctttactcagtgcacaacaataccctgccctttgtcccccatggatcaagtcagaatcatcagttggtttttgattccttcctttccttttggctttacctctgatcagctaccaagttccatagattataccttaggattaggtctgaccatgtgtgggtgacacacttcaaaagacacacagggccagatacagtggctcacacctataatcctagcactttgggaggctgaagcaggaggatggcttgagcagaggagttccagaccagactgggtaacatagggagaccctgtctttaataaaacaataaaaatataaaaaaataaataaaaggctcatagacccctgcagcacaccaaccagaggataacccaggatgcaggagtgggagtgagtgtcaatgaagactggaaactgacacagcaggacctgggaaatagatgcctggagagcagaaagccccacaggaaggtacaacagcctctcagtaaacactcagagcctttcaagagtttggggcaagactgaaacatacacccaactccatgagttccttgaaagaaataatagacatagaagaaaatgtccagcacctaaataccctcaaacttttcttgagaaatacaaagcagattttttaaagtacgaatatcattcatattagcaaaacccaaaattgatgatgatgaacattttttatattcgtctttttttttttttaaagaacattgtggatattgaacttttctctttaactacaagcctccatcttatttctgtttctttcccccaagggcattcactatcatgagtttatgcatctttccagaacatttttaatattttatatagtatatatatacatgaaatcatatagctgtaacttaactccagtttggctgctcactgctcaaatgccaaactcaagagactaaggttggtgggaggaaaagcaggttaattcaggagccagcaacccaaggagatggcagactagagtcaggaaactatcccaaatgccctaggctggccagagggattttaaagaggaaggggcttggaaaactgtgtgcaagagttagctacgtacaggtcagcatgtcttgttctgattattatcttgagtaacgggccatctagtggtcagctagactgaaacaggtttgtagattaactgctcagtatttttcttctccaggggacatttcacatccttgatttttatctcatggctagttcctggaattcttaagtaagcactgtttaagaaagttaagcattgtaaaagaaagaatggttatttgcttccaaaatgaagtgatgggtttacagtccctttttgtatttctaaatgattataactagtatcatactatacctatcattctgtaacttacctttttcttttaatactttttagttactttagatctagtagtataggtaaatatagctcactccttttcattgccatgcagtattttattttacaaatatatcacatagtatatattctttatctattcctatcttgatggacaaccatttccaaattttaatattacaaacaatatgataatgaacatcttcatatgtctctttgtgcacatgtgtgagagtttctctagggtatatcccaggagatagaattgctggaacataaggaatgcatatttacagtttcatcagattttgccagatttctcttcaaggtgactaaaaaattcttttctactctaaatttttagtcccagaccctactgtaaaacatgaggaactaaactagaccatattaagcacttgtagaggtagcctagggtctggaacaaaagcaaatcaaatagcctacttctttttttcctccatgtcacacttaaaatttgaatttcagggcagtctccaagggacaggtcagtgggaagaggagaacgcaaaaagctagagcgaattgtatttgctttacctttagggaagtgctgtctagactctcactccttaaggataccagggatgagacacccaagagtaccaaagagaaagagagataggagtaagagcttataaaaaccaggtgcagtggctcacacctataatcccagcactttgggaggctgaggcgggtggatcacctgaggtcaggagtttgagaccagcctggccaacatggtgaaaccctgtctctactaaaaatacaaaaattagcttggcatggtggcacgtgcctgtagtcccacctactcaggaggctgaggcaggagaatcgcttgaacctgggaggtggaagctgtagtgagccaagattgcgccattgcactccagcctgggcaacagagagagagtccgtctgaaaaaaaaaaaaaaaaaaaaaaaaagtaagagcttatacctattgaatacttactataatccagaactattttaagtatgttcatatatttaatctttataattgatcccaaaggatgagtccgttgtttctatttattgccattgccttttttcaaagatgtaactaaagcatctttatatatacagatgtatagataagtggagaggcagcctggccgtataactgcactcatatgcctttctagcctgctaaaagaagagagacttccaaaagccaaaatcccaagagagacccaatgtaaaatgtgggccaatctttgaaaatgtgagtgtccttgaacctgagcaatccgtagaagtatttctcatccttgagagcagtgtgggaggattaaaaagagaggagctctcaactcttaccccctaaaagtcaatagagtagaaaataaatttctgatgtttctagagaaagaattaggaaaaggcacctagttgtggaggggcaagttccgattaatatcaaaaaaaaaatctttaaaataattaaatcaattagagcaaagactgagaacaacctaaatgtctacagaaagggaaatggcttaaatagctttggtgcatctgtaccaaaatactataatttaatgtataaaatcacttgtaaaagaacaaggaaactttatgtattaatatagatctctaaggcatattactaaatggaaaaaaagccaagtacaggataatgtaaacattctcccaccattttggtgtggttgggatggaaaggtagatgggaaggctatatcttgtatctactatttggaagaaagcacaagaaacaatggtcatcttctgttgggaggtggagggggacagggactgctagaaggagacttttcataaaatatccctttgtgcttttggatttttttttttttaagttctctcactcaggctggatgcagtggcaggatctcagcttactgcagcctctacctcctgggctcaagcaattctcccacctcagccttccaagtagctgagactataggtgcctgccaccacatctggctaatgttttgcattttttgtagagacaatgtctcactatgacgcccaggcttcacttttggatttttgaatcatgtgagggttttacctctttaaaaaaatgcttaaaatacatttaaaaaatgaaaatgaaaaagaaacacaaattttttaagtgggggaagtgggagagcaagtcaagtggtctgagtctcagacatttgaggacctggggagtggagcctcctgggcgactgagagagtgaagagatgttatggggggatgaacccaatcctctctgatactcttcgatgggtattagtagagacttgaaattgctttttgactaagtaataatgatcattaaaatttcctgtggggtagtaagttctgtgtcaatggcagcactcaaggacaagtgagataaacactccagggacattgggaaaggggacttggggcctcagataggaatttagattccatggaatgcacaaattttacaatctagaattttgtgatttactctttcatgtctcatgttcataggtcaatgccttgactcaaaactatttattttatctctgttatctttaactttagagtgtaattcttatcatcaggaatcaatttttagcttgtgtgctagcggacaatgttgtaatcacagaagatgtgctgttcacatttgtttaccgaatgttttggaggtattccaaaaatcttcccttcctttgtaaaatgatgacttactttggaattgcatgttttaaaatgttattttcttttaaagaataaagttgtataaattaattgaaagtcaaaagggattcagcgttctaaatatttatttatttgattttgtcttaaaggttaacagcttttgctttaagagtacttggacaagtaaataaatacgtagagcagaaccaaaattcaatttgtaattctttattgtggctagttgagaattatcaattagataatggatctttcaaggaaaattcacagtatcaaccaataaaattacaggtaaggaaaccaaatgcacaaattagcaatagttttatttagtttgagttttattctcatctgattatgggaggatgaagaagaagaagaaaaaaatgtaattctgcaagaaattcctttgtgaacaagcaaaatatacaaaggtctttcccataatatctgaagtgaagcgatcttcagacagttcactagagatcagagaagtgatatcttagacctctcgtttaacggggtggaggtagatgggcaagtgaaagcactcaagcgagatagacccagggcttattgagaaatgggaagcaggaagggaaagagtgggagataaggcttaaaacacagagtagaggccaggtgcggtggctcacgcctgtaattgcagcactttgggaggccaaggcgggcggatcatgaggtcaggagttcaaaaccagcctggtcaatatggtgaaaccccgtctctactaaaaatacaaaaattagccgtgcgtggtagtgcacgcctgtagtaccagctactcagaaggctgaggccggaggatggcttgaacccgggaggcggaggttgcagtgagccaagatcaagccattgcactccagcttgggtgacagagtgagactccatctcaaacaaacaaacaaaaaacagagtagaatcaggtcatttcgccttaaagacaccatttcactccccttttaaaacattgcttctttttagggtaccttgcctgttgaagcccgagagaacagcttatatcttacagcctttactgtgattggaattagaaaggctttcgatatatgccccctggtggtaagtaagagttttctttctctcacacccatcatctatttctgtactatatactggaggggccaccaatcagaagaccttttgtttcaaaagcttcttttccttctttccaataacttgaaaataacttaaactccagaattgaaagatttcagaacaatgatagatattagagaccacctagtccaacctactcatcggcagttgagaaagctgaggactaagtaaggtgaattcagtttcccagtgtcacaggctaataaattgtagagctgggtctaaaactgatagctgggactgggatggaagaatgatccagtgcccccagcttctctgtcttatctttgctaaatcctgctttatatgttactgttatcctatagtgaaagcattctgtatcatgcaagtactgaggatacacaacagcaaatgtgtatcctccaaatccttccaaacaacatttgcttggaaacgggagaaaagtgatgagccacctaagtaaatcaacatagaagatttccaaggttgagatggaaaatctcaagtggatttgcaaaactggaagcacaaaacaaaaccatttgttttcagtttgtttcagaagcttaacaagacaaaataatcaatgaagactagttcccaggcacctagtggccacatgggtgagagatgcatgtggagctgggagaggaggcaggcaggatgttagcagcatcgcagcaggctttctgctggcccacttgcccaacacaaccattttggtggcgtcaggactagtgatcgggactatttacccaggcattcttaggatctaaaagtactgtggcagttagggtttctttctgctacttattgttttatttatttatttttttaagtgtaactccttttgaacctgtgtgcctgttgcaactacgctgagagggaacaataaaagttgtgtctatgggccgggtgcagtggctcacgcctgtaatcccagcacttgggaggccgaggcgggcggatcacaaggtcaggagattgagaccatcctggcgaacacggtgaaaccccgtctctaccaaaaatacaaaaaaaaaaaattagccgggcgtggtggcggggcgcctgtagtcccagctactccggaggctgaggcaggagaatggcgtgaacctgggaggcggagcttgcagtgagccgagatcgcagcactgcactccagcctgggcgacagagcgagactccgtctcaaaaaaaaagaaaaaaaaagaaattgtgtctatgctcggtgccttttcttcctggaggctaggtctgacggtgtactcagaaactaaaggcacaaaacctctaaaaggaaagtgagaattcagaggcaaaaagcttaacctgatttggacaacctcattgtcccttccaagattatgctctgctccttctctcggagggatttgcttcactgagaagccatccatttccattaggtcagtcctcttttcacccccatattgcttgctccaggatagtgggatctgagggtagttcatatcaattgataggtggttgcttgacatagaaactgaagtatcttctcttgtttccagaaaatcgacacagctctaattaaagctgacaactttctgcttgaaaatacactgccagcccagagcacctttacattggccatttctgcgtatgctctttccctgggagataaaactcacccacagtttcgttcaattgtttcagctttgaagagagaagctttggttaaaggtataacttgttccatacatgtattcagtgagtgttcactaagacataaagtctgctagtctgggaagtgggtggtgacatgtgaacttgagtaagatgcaattcctgtcctcaaggaacaaaccgtcacaatacgatgtaatgtgtgccgttattcattcatttattcatgcattcattcagcaaatatttattcttttttttaagacaggttctcgctctgtcacccaggctggagtgcagtggcatgatcgtggctcactgcagcctcgatctcctgggctcaagtgatcttcccacctcagtagctgggactacaggtgcccaccactgaacccagttacttttttttatattttgcagatacgagtctcactgtgtttccccggatgatctcaaatgcctgggctcaagcactcctactgcctcagccttccaaagtgctaggatcacaggcatgagccaccacacctgtcctctatttattcctttattcaataaatatgcattgagtatcctatgtacaccctggacaccccctatatacctggcactattccagtctctgggaataaaggaataaacaaaacaggctccccaaaatccaggccatcatgaaacttaaattctaactggggagacacaaacatgataaataaataaagctttatgaatagatggtgatggctgatatgaagaaaaatagagcagggaaagaaaataaggtgagaggatgcattgtaattttagacaagctgactgggcttaagtttcactaagaggatggtgtttgagtcaagagctgaaaggaggtgaagaagcaattcctgtggctatctagaaggaagtacctggtggagaacagcacgtgcaaatgccctgaggcatgggcatgcctggtgctccaagaatggcaaggaggccagtgtgactgcagaggagtgagaagaggagtaggaagtgaggtcaggtaaggaaaaagtgagggagcaagggaaggtcatttaaggcattagagagactcttcagggcttctgtaaacagttgtgccgtggacaaagtacctaagcaatcaagtgaatcgaggctgaaatctagcctgtgctccactcccccggccacataccctagtttagggctgcttccacctagagcaaggagtgcccatgtcttatccacagcaatgtgctgtggggaccagaaggagccctagaactttaatttcagctttgagagtgaaaaggggagccactgggggattttgagcaaaggagtgcatgacctggcttatattttaccaggtttgctataaaagtatgtgtttggttttgaagaataaagatactgcttcctataggtcaagagacaaaaaatagaaagagagtagcagtgattattagcatggttgggcactttggagtcctcttctagctaaggctttataaatcttactgaggtttatgaccatctacaaaatatgatttgtgccatcattttaaaattactatattttaacatatgcctcaaaaccacttgtacgatacttcaaaaataacacaaaagaaatgtcttgggtattgtgagatatgggtcataaaatcataaaatttaagatctagaagggaacttaataatccaagagttgttccagttgggtttctttaaaatcctaaactcaactcttcattttaaatacagcaaatctgagactctgagaggaagggtcaatatcattttcaaggtcatgcaaataatgtagttatgaattataaacatacacatcaaaatttttactaaccttcaaatatgatttccaaatatgcattactttttttaaaacaaatagtttgttccaaaaaggatttgaggtttacaggtttaaataacaaatataatttacagcctaatttatgaaaagtgctgcatgtacgaaattgtcttgagtgctttaaattggaaagaaataatgaaagactgaactaaggctttaggtttaatctcataatttccaggatgtaaattttcctatcaggaaaaaggttctccagtttattttttagtgtcagtaataataataataataataatcccttatatatgcatggtgctttctagtttacaaaatcttttactttagtatttcatttgagtttcactgcatggaagaaagtattatctatactataggtattaggaaattgagtcacacagaactaaaggaatttgcccaaagtgacatggtaagttagcaacaaaagaaagactagaagctgggtgcaataccagtttattgcactttcgactctactaaactgccccttcctagtacatgtgtactatgttgattttaaaatacagattgaggccgggtgcagtggcttatgcctgtaatcccagtactttggaaggccaaggtaggaggattgcttgagcccagtagtttgagaccaggctggataacataacctggcatggtggcacacccctatagtcccagccactcaggaagctgaggtgggagaatcactgagcccaagagattgaggctgcagtgagctacaatcacaccactgcactccagcctgggtgccagcaagatcctgtctcaaaacacacaaacaaaaaaaacaaaaaataggttgagtgttcctgatctgaactgcttgggaccagaagtatttcagatttcagatttttttcagattttggaatatttacatatacataatgatatatcttggggatgggactcaagtctaaacatgaaattcatttatgtttcatatatactttacacacagcttgaaagtaattttacacactattttcaataattttgtgcatgaaacaaagttttgactgcattttgattgtgacccatcacatgaggtcaggggtgaaattacccacctgtggcatcatgtcagagctcaaaaactttcagattttgggggcatttcatatttcagattttcagattagggatgctcaatgtgtaaagacaagtaataccatattaagggatctcgttttgcattggtcatcttcaggaagttcctctaacaagaaaaagtaagtagcttctagaaactggaaggccataatacacctggtagaattattatgtcaaattcacatttttaatcatattaatgaatggaatttgttgatgttcaggtaatccacccatttatcgtttttggaaagacaatcttcagcataaagacagctctgtacctaacactggtacggcacgtatggtagaaacaactgcctatgctttactcaccagtctgaacttgaaagatataaattatgttaacccagtcatcaaatggctatcagaagagcagaggtatggaggtggcttttattcaacccaggtaacatttctttgtcttgtttcatctccctgtagacatttttattttctcccccaccacactcatctggcctccatgcctttgtccaccaaatgagcatgcaatagatatgaataatgcctagaattgaaggacccctacaggttatctgcgtcaacactcttattatacagaagaggaaattagcccagggagttttactcagggaattcatggcagagccagaatcagaactcatgtctcctgactttaagcccagtacttccttcatgattctaaatcaccatgaaaggctagtaaggttattggcaattatatcatatcctatgtaataaatagtggttgccatgtagacaaaggtactgatgctccttctccacaacgaaataaataaaaagtgggagaaatactgattgttacatgttaatctatctagctatttaatgtaaactcatttgagtatgtatttttattacaactaattattatgtagtcgtataatacatgtttatattcaaagtttagatcgaatgttaatatcttccctgttgcctggatgtttagataatgatggagtgtgtatatttatatatatgtaatttagatgtagagagggccttcagtattaatttactgaccatgtaatgtgttttattttgggtacaattatagggttagcagaaaagactgccctattgattagcatttgccgccacagatataggcagagggaatggccacattgtttaacatctctgatctagtcatgtttctcagttttatagatgagaaagatgaggtccagaaagataaagtttattcatttattccttcaacaaatatttatgtacctgctaaatgcaatggacattgccttagtccattgtgtgttgctgtaacagaaaaaacgacacactggataatttacaatggacagaaatttattacctcatggttctgggtcctaggaagtccaagatcaggggggctgcacctggtgaaggcattcttgttgcattattccatggtggaagggcaaagagaaggcagagtggagggttggtgggagtggagtataaactcatctttttataacaaattcacttctataataagcagcattaatccatttatgaaagtggtacgccccatgacccaaacacctcccattaggcctcacctcctaacactgccacattggggaccaagctttccaacacatgaactttgggggacacattcaaaccacagcaggcaccaagaaaaatatattacctacttgcctcacaaatcttatattgcagtggggtaggccaacaataaactataaataaaagcattacaaattgagatgaatgctagaaagggcaaaaagggaaccttaaaacagagaataacgggaaaggggagtttatggccttgttgtggagatacttaaggtcagactaaaggatgaggaagagataattgttcaaagactcagatgaattctgcaaacagtgacttgcctgaggttacatttgcagaatatatagaggacccagatctgaggccacacttccttcctgtccctgctaacagcatctttattgaggagggagagacctttcttccacctccacaatggggctcttaaccagtcttactgagtcagctggagtttcatctccagacaatgctgccctaccctctcataaaaagggcatttgtaaatagggagtacataaataaactaaacatatttttgtgccttgctgattgctgacaggacacaatcaatgccattgagggcctgacggaatattcactcctggttaaacaactccgcttgagtatggacatcgatgtttcttacaagcataaaggtgccttacataattataaaatgacagacaagaatttccttgggaggccagtagaggtaaatgaagaactttctgtagtattttacaattggctgagaccattgaaatcatctgttccactctttattttataaatctatctcttcactacttaaacatatattgagtgtcagctatgtcctaaacagggatgcctgctatatcctgggcactgaggattcaaaaataaaacacaaacaatcagcgtagtgcagggagattgtcatttaagcagatagtgaaaaataagagtcttgataggtacatggaagtacagaggggccctcctgatcctggctgaaagatggagggagtttgtcagatgtgtccagatgtgtgggttaaatctgaaaaaatcagaatgagttagccaagtgaagaaaaaggaagaacattccagacatagataacagcgcacagagcagtacagtgagcgtaggagggaaggcatgtctgggaggctgctggtggtcccttctggccctggtcatacatgcagactgtggccaggttggagttggcctttagggtccccagctccttgccccatgtcctttgctactgctggatttttaaaggtggtaactttgatggcttatgaaaatttcacaaagaacaagacatgttggaaaaactgggttctatattaatattagctgcccacatatagctgctgatacatatttttctaattactgtgtttgcattattttaaagtatatttaaatgtacagtaattggaaataatcctcattgttgacatccttcacaaattggtgtttgttaaaagtaaacaagcatgagaaataattttttttttttgagatggagtttcgctcttgttgcccaggctggagtgcaatggcgcaacctcggctcactgcaacctcctgggttcaagcaattctcctgcctcagcctccaaagcaggcgggattataggcgcctgccaccacacctggctcattttttgtatttttggtagatatggggtttcaccatttggccaggctggtctcaaactcctgacctctggtgatccacccaccttggcctcccaaagtgctgggattacaggtgtgagccaccatgcccagcagagaaataaaatttaatgcaaaaattgcaaactggtggcccatactgaaaaaaaagaatatggatataaacatagacatagatatatgccaacatttaaggatccagatatttcaaataaaaacctgattcccaacttcccttgataaaccaaaagacctgaaagcaaagcaccaggcattggcatggcttctacaatttactgcagtccccaccagtcacaggacgtatgcatgtgcatttatgttcatacctgctttgtgcccgggcctctgcaggcatttgtgcttgtggtccctagtttgggaatatgtctcctttccctgggatcatttagagttcaccggagattcatgttctgagtctaagctctaagaaggatctcttgaccttccagctacctgaggtagctgaaattattcttctctatagggataatgctgtaagaggcctcttgtcatcctaacaaaatttaaaccccagcccaggatgctgcttccatgtaaaacctgggctgttattatccagtgtggaattttctactccagcatttcctgaaatgtgttccatgaaagagtgttaggtggttgagtgtgcattaattaagttaaacaaattaatttaaattaagttaaacaagttctttaatccagaattcccctgttctgtaacatgtatgtgattaagtgtggtgactctgggtgtgaaaaggggcagaggcagggcacagtgcacagcatttcccaaacttatttgtcatgcatgcttttcacatgcagtatctcaagacacctgttttccaacaaatgctgctatattctatcagggagaacaagaatgttgacctactttcctacatttactaaaatttgaaggaaggattgagaaactttaacatatgcccaatccatcttgcattattgtgctaagcaaaggaaaggggaggcttggagtaaaggaagtgccaacccctcgggctcaaaattatctctcctgtactttccacaaattagggagcatttggatgacagagtttctctggagaggagaatgacttaactccgtttatgtcttcagtttcctcctagcagagtgggaagaagagcagcagcaactaaggatttggcaggcttgagtggggtgctagtggtttggggtggggtaccaggggtttctgcaaacaaaggcggtgacaagtggaaaagataaatcatcaagagatggaaaaggggtgcaaaggaggagctcagagaggaccaaagatagatgcacccgctttcaagttatgtggaggttccctgctctgggttctaatgaaaacgatctccattggcacacaggatgctgattcctgagctaggcacagaaaggaatttattcagttggcaaaaggagatgaagatccagatttaccatagccatatgtaaatgaaaatgtaaccagaagtgacctctgacatgttgcttttgttggttcactcaggagatctcagacatcttatttacatgtagaagggaaaggggaaataccagccttgtttagcacctgccatgggcataggattttcagtgtctcatccagttactctcagaagagctctgagagaggaggctggtacatgtcaacccacttttcatagctctatcctccctccctatcaaatgatgaaagaaagcatggtttgtttctctattatctttccaggtgcttctcaatgatgacctcattgtcagtacaggatttggcagtggcttggctacagtacatgtaagtatttaattgatatccaataacgagttatgtgtccatttgtactaggtaacataaaagttaggagctttgccacaaagtcacagaaatctgggcttgggtaaccatgactaaagtgggattcacttatgtaaatctttctagcaatctttgtaactatcctcacaatttttttgaaaataacaatgttggtcaggcatggtggctcacgcctttaatcccagcactttgggaggcctaggcgggcagaccacgaggtcaggagatcaagaccaccctggctaacacggtgaaaccccgtctgtactaaaaatacaaaaaattagccgggcatggtggcgtgcgcctgtattcccagctactcagaggctgaggcaggagaatcacttgaacctgggaggcagaggttgcagtgagccgagatggcacaactgcactgcagcctggcaacagagcaagactccgtctcacacacacaaaaaaatttaatccttatatgtatacattctgtatacttatagaaattatatatatttatagagatatataattttatgattatatatgtgtatacgcatatggcatatgtgtatatacatatatctgtgtacatatgtgcattgtatatatatatgttttctatcccatctcatttatccaggattttgggggatttatgtgttattcataaagacttatttcttcattttagccacttggcagttgcaattttttttctttttttttttttttttgagatggagtcttgctctgtcacccaggctagagtgcagtggtgcaatcttggctcactgcaacctccgcctcccaggttcaagcaattctcctgcctcagcctcccaagtaggtgggattacaggcacatgccactacgcctggctaatttttgtatttttagtagagacggagtttcaccatgttgaccaggctggtctcaaactcctgacctcaagtgatccgtccaccttgacctcccaatgtgctgggattatgggcgcgagccaccacgcccagctggcaggtgcaaatttttctaggctgtttaagtattttcatgcattcttaaattgcatgttctgagcataaattaacatcctattaataattttaatcacgctcttatctttagtgcattcattccttcaaggactgttgtaagtttatatgggggaggagagattgtccacttttctgccacttctggttggtgtcaatatatctacttctggcagcacctctgcccattcatacacacctataatttgttgtttgccatgatggcgtgtggctggaagaaacccacacttcttagccttgtgctgttgtgtgtaaaattaaagtggaaaggttcaaaacaagaaccttgggaactctcctgtagagtgaggtgcccagatttgactgcatggaatttagaccaagcttctgaccggccagaagtcattttttgcttactttgggcctctcaggtttagattatggagtttgcttaaagtccagctgctggaaaaatgagtcactaatgtacaccatttgtgctggattatgaaaatgatccttcgagcatcccatctgcagcagcagtgttgccataatacctttgtcactttcccactttaaatagaatcttcttgcttacttgtccccaatgtaggtaacaactgtagttcacaaaaccagtacctctgaggaagtttgcagcttttatttgaaaatcgatactcaggatattgaaggtaaaaacagcaggatttacgctgtaattttggctaaaaataaagcatgtgtataaatagagagcttctctgattagtaaaaatgtgcttactcaaaaagtgaaatttcttaaccaaatactttagcaggttgacatccaagtaaatattacttccattttttacaatagataactctttaatatagtcggaagctaatattaaataacaatgactaagctaaatgtatttgctattgatcaataaattgttttgactatgttatttttaaagagtgtaactagttgtaaagccacattaaggtctaattccagaaccaggaatttctgttacttttgtgttagccttccaatctgggaccttgaattctcttatcaccctgttagttttccatcccttagcctttctgtattccaaggggcccagaaaataaacatttctctgcctccatctttaacttagtctctcctgtacccctttcttttttagtctctcctgtaccatcctttctttaaatgtacccctgacccttttatttaacccaaggccctcacatccctctgctggttggttctcccttcctggtccaaaagcaagtccacttgcacactccagtcctcctggtctccccattgcctccagggtcagaatgaatgttgctgcctctgccctgatattttccatctattgctcagaagcctgttcctacaggaaacttcccaactaccagcaaattaaggcatctgttcttcctccctccaacatcccccaaacatattaccaatacatatttatctttaataatttcttcattaaattataagttatttgagagcaatgaactgttaattatttaaagacttcctggtattgtcaatagccatgaatttccattagaaccactgaaagtatctaaacttccaaatcacaaatcatttttaagtgtgttcaaagatttgctcattaatgattctgttctgacaggttccaaagcagctgaaaacagtttactcttatatttgtctgtttgttttcttgtcttatgtgccagcatcccactacagaggctacggaaactctgattacaaacgcatagtagcatgtgccaggtgagcctatttccacaaaggggagcatagactccaagttctcatttttgttaacgtattgtttctttacatattttcaaattttggtatgtccagaagatacaaaattgttcaattgtttaaaaatgcagaacatatatattcttaaattgctacttaccataaaaaacagccttggttttgctcataatagttttctctgtctgttttgtcttctgattcaaacagtgtaatattaattttttctctttcagagggatagaaatgtgatttaaaaaattaggaaaaaaatataaaagattctctcaaaaacagcccctactctcttacttagaaaaatcacatttacctaacaaaatccattatcagctagattctcaactcaagctgcacattgaagtcagctggagagctcttagagctgtccaaatgtcccgggctccagaggtcattctaatggtagccagggttgagaaccactgatgttaaaccctctcccaactaaataccgaggcctcaattggccactgtattagtttcctgttattgctaggtaacaatttattgcaaatgtaatggtttaaaccaacacagttttactatcttgcaattctagaggtgagaagtcccaaaatcaaggagctgggtagggctgtattccttctggaagctctagaatttctttgcctattccagattctagaggctacctgtgttctttggcttgtggcccctctctgtcttcaataccagtgtcacagcatcttccaatctgactgtgacctctgcttccatcatcacacctccttctctgactctcctgcttcctttcctcataaagattcttgtctttacattaggcctgcacaaataaccccctatctcaaatccttaatttaatcacatctgtaaagttctctttgccacataaggtaacatattcacaggttcaggggattaggacatggacacccttgggggccattattctgcttaccacagccaccatcctaaaacatttatgaaagtgtaggttttttgccgggtacagtggctcatactgtaatcccaacactttgggaggccaaggagagagaattgcttgagcccaggagttcaagaacagcctgggcaccatagccagaccccatctctacagcaaattttaaaaattagccagacatggtggcacacacttgtagtcccagctactcaggaggctgaggcaggaggattgcttgagcccaggaggttgaggctgcagtgagctgtgaccacgccactgcactccaacctggacgaaaaattgagaccttgtctccaaataaaaaaaaaaagaaaaagaaaagaatatgtaggtatttgaaaatatgtatatacttttggctttggtgatcacacagtgtgatcagagagtggtagagccaggactgaaacacagacttcttccctgttctttccatcgtccctcagtcctttctattgtgttctattttcttaactcttgtattgtcaataacagtgatatctgtggatggcattttgctgattttacttataatcatgcacccagtgtggataacttggaaattcaatagtgttgtgcaaaagatgagagctgagaaggaccttagggatgatatcataatcctcttgttttggaaatgaagaaactaagacccaaagagataaagtcgcctgccaaatgctcacagagttagaggcagagctaggggctcaaatccccaacctctgatgttcaatccagtatctaaaccacatcttttttttttttttttttgagatggagtttcactctgtctcccaggctggagtgcagtggcgtgatctcggctcactacaacctccacctcccaggttcaggtgattctccttcctcagcctcccgagtagctgggattacaggcacatgccaccatgcctggctaatttttttatttttagtagagatggggtttcagcatgttggccaggctggtcttgaactcctaacctcagctggtctgcccaccttagcctcccaaagtgctgggattacaagcctgagccaccacgctcagcctaaaccacctctttcaatcagtgtaatctaagaccactaatcccaaggaacagcacatagtttctccctgcctccctcccagctgtttcccagtcttctctatgtcccaagcccaatcgcttcttaggattccttcactattcagccctatttccttcctcatcagcatttcttccttccagcatttcctacttccttctgtggccagtccctgctctctgttcccgctcaaacatctttcctcattccctaatgtctttccagtaaggtcgccctttcccaggcagcttctttccccctaaatgccattcctacccttgggcacctaccagctggggaggagcatgatcacaattacctttaaatttgtaacagttgtcaaagggaagtgtaagcaaacttctgggcagagctcgaatcagtgcctgggaccctacagggaggcatctagacttgcaataaagaagagctctctgatagggtgagacacctgtgggatagcctctaccagtaagaactccagtgaccttcaggaaatcagtttacttctccaatcctcttctataaagcaaagatattgcactaccttatctcaagttttctgccagttctaattatccacaattctgccgtacagaaaaaagctgttatcaaaaattcattcatttgacttcattgtcaggaggcctaattccagattatcaatatacaaaagaaagcaaggagaaatgcaatcttgaatagtctatcctttggtttttacaaattggggacaaaatgttccagaaaggcgggtggaatatgcttttggctctgttgacactgaagttaggttgggtaaattccaaaaggaactgtgtagtacttattcatgtaggaacttctttgccttcaaatattctctctcctgattaaaaaatgccagcatgaagtttctgtgttcagagggtctctttcgtgtatttacctttttacaacctctctgttgtattcctaagaaaagaaaaaaggatttcatttccctcacaacaaaatgcctttggggaagattgctggttttggcagcaggcaaagggcttcttgaaaggaggatttctgttccaccattgaaacagtctccatggcaaccagtcatcaaggctccagcaaccttttcatagacactctccactcgggaggcccttttccatcctgctgacaaagtgtttgcatctgtgagcaagagtgctctgcttctacccatccaattagggagatgttcggatgtcacattagagttccaagtgttttatattctgttctaaattgttaatttggtgaagaatagggttaaatttttatgagtcagagattttagaatacttttctttattgtggcaaatattacatctatgacttctaatggggactgcttttatttatttatttatttatttatttatttatttatttatttttgaggcagagtcttgctcagttgcccagactagagtgcagtggtgcgatctcagctcactgcaacctctgcctcccagcctcaagccattctcgtgcctcagcctcttaagtagctgggattacaggtgtgagctaccacagccagctaatttttgtatttttagtagagaagtggtttcaccatgttggccaggctggtctcgaactcctggcttcagctgatctgactcagcctctcaaagtgctgggatgacaggtgtgagccaccgcacccagctgggactgcattatatatgctctatgaggtgtcattgaggaaaagatatgccctgacccctcactaacttgcttagtatctcctcttccaccaacattcatacctgtaggtgagatcaattcattttaccccttatgaagctgtcttttaatttcttcctttaatcctgactgctctcccaagcttcactctcaaacatccagctgcctttcaagcatcttgaggtgaggctggaacctgaaatcaacttttacagaatcacactccgtctgtctctgccccagcctcagccccgccagcctgtctcttttatgtcttctaacatctcttaatggtagctctaagcctctgccacccaaaaccaaagcctgggaattataaagataaatttaaaacacaaacttatacttcttcacagttaattttacaaataagaaaatgagcttagaaaggggaaatgatttgtgggaatctcagaactggaataaaacccaagtttcctgattctccatttcagtattcttttctctcttacaaaacaaaaacaaaaacaaaaccctcccattgtgccctttttgcatttccgcttaaattcctactagcagaattcctactgaaaggacagtccttgaaacattttctatataaagtagctattatgggaaatatagaaaatagagaaaagcatgaaaaagaaaagagataattgcttataatctcaccatccaaagtagctactaatatttgtgggtttgtttgtttgtttgtttgcttttaaagagggattctcactctgtcgtccaggctgaagtgcagtgctgcgatctcggcgcactgcaacctccgcctcccaggttcaagcaattctcctgtagttaggattacaggtgtgtcccaccaagcccggctaattttttttgtatttttagtaaagacggagtttcaccgtgttagccaggctggtcttgaactcctgacctcaagtgatctgcctgccttggcctcccaaagtgctgggattataggcgtaagccaccgtgccttgccttagtgtattttcttccagcttttcctggacatgtttattgaatctcttttcaacatacaactgattttttccttggaatatgcttcattagaaaatgaactaacgtgagaatccaaagacctggattcttctgtagctctgcatgaattagccatgtgaccttgaaccagtgccttactctcatcctgagtttccccagctagttagcttggtgtggatgacttctgtgttccagtagagtggtctgttgagattattgatcaagtgaggaaagagaatagatgactcaaagatctcttgcaactctaaagtcagagattttaacccatacattgtagaaaagcaaataaatggagacccaaatttaaaaattaaggtctactaaggaagagtgtcctttcttaaagactcttattcacttatttattatattttctaacctcttttttattttagctacaagcccagcagggaagaatcatcatctggatcctctcatgcggtgatggacatctccttgcctactggaatcagtgcaaatgaagaagacttaaaagccgtatgtgttttcttttaaatcgtgttgtgaatgcttcattttcttttctgaattattttatagacaattttactttctttcatttgaatataccacttttatagaatcacccagaatatttttttttttttggaggtggattttcactcttgttgcccaggctggagtgtgatgcagtcttggctcattgcaaccgcacctctcgggttcaagtgattctcctgcctcagcctcccgagtagctgggattacaggcatgcaccaccacacctggctaatttttttgtatgtttagtagagacgaggtttctccatgtcagtcaggctggtctcgaactcctgacatcagggtgatccactggctttggcctcccaaactgctgggattacaggcgtgagccaccaggcctggccagaatattcttttcaaaacataattaacctaagttttgatttatcaaagtgaagcagaagcatacactagcatgctctgtaaaatatgagtttatatgctaatgtgttcagactttttcaagaagaggaactgctcttcaatttctttgaattacagatcacatccctgcattgtgctatctcatcaacaggtgaatgcatttaaacaaaaagataatgaaatgaaattcaagcttctctcttttcccccttagcttgtggaaggggtggatcaactattcactgattaccaaatcaaagatggacatgttattctgcaactgaattcggtaagctccacctgcaaccatttttcctttactattactattcaaaatatacaggctaaaagattataaatatcatctctccataatttccttaaatccttgaatttgttaaacagattccctccagtgatttcctttgtgtacgattccggatatttgaactctttgaagttgggtttctcagtcctgccactttcacagtgtacgaataccacagaccaggtaatcaactccatgctaacatttcttcagaagaatactttgtattctttccagaacatttagaaatccactagagtcctgtaaattttatgtattgcctctcttagggaccactcttcatgaaagtcccaatttgaacattcaaaactactgcatacaaaatattgtacataaactacttcttgacattgagcagaccgtttcacctcagtcctcagtttcttcatatttaaaataactggattatagtgcctccaacttcaatattctttgcctcaggtttatctatggtgttcacagataaatcatatctctccttttgagagaaatcaactcaatccccccagaacaacttctagcccatctatattcttgttacactttgcagatagctctattatagcagctgtcacattgcattcaattatttgtatgtctttttcatcaaccccagggtgttttcattcttgtgtccctagtatctaacgcagcgtcgggtatagaatgtgaactcaataaatatttatgaatgggtgatcccacatttgactattcagccatttttgagaatgttatgtggttggagagcttattggatcacaagacagatgactccaccttgggcagttctacttgttagaaaattcttgaagtgaaccaaaactctgacacccattcattctagttttatattctgaaatcacatagaacatacatagtccctcttccccttgagatagatatatagagatacatagatatatgcttttcttcccttgtccaccctaaacaattccaactctttcaaaagatcctcatgcaacataatttattttcctcttacttagagaagcatcaaatgttttatttctgagaaacgagtgtttcaagcacagaactaagtgaaaaaggggagatctttctgagggtagcggaacccttcccaggacagccaattcataattttacctccctgggccttagctataaaaagaagggtttaaaataagcaatctctgaggctccatgtaagacacttgccaattagtaaatgtgttgttcttcaatcaaaccacttctcttaaccacacttttgttgccacagataaacagtgtaccatgttttatagcacttccaatatcaaaattcagaaagtctgtgaaggagccgcgtgcaagtgtgtagaaggtaaactttatttaacatatttaggctgcatgcttatttaaagcagtcgttcataacctgaggttaatctgggggacactgtttggtaaactgttctttctcagaagtagaaatgctatctcagctaattgaaagctaatgattccttgagcattgtaaaactacattttcacagttcctgaacaacctgatagttcatgctgtacagaggcagggaaacaccatcgagagggttgttgaatattataggggcaacatgatgtgagattttactttcacctagtctttttatcatataagacaagaggctcagcactgaaccactagcttctgttccttttctcttatacttcccagttaatggaattcggtttattgtccagttccatttagtctttcctaaattgaagaaagccttcttggccaaggaaaagatccagaactcaccaataatcaacagctggctccatgagggtctcagttagttttggttttttcaaaatcctcaatatctacacattttctaggtacttattgtgccattttatagctataaatcagtcacattatcattttgggtccttcaaaggacttctgattatactcaaaatggaaaatttccccctttcatcaagggaaccacatacatttctaaagacctgaatgtggagtagccacccagtctaacaataagtcttatgccaggggtgtccaatcttttggcttcagtgggccacattggaagaagaattgtcttgggccatacataaaatacgctaacactaacaatagctaatgagctaaaacaaaaatcacaagaaaaatttcataatattttaagaaagtttacgaatttgtgttgtgccgcattcgaagctgccctgggctgtgtgctgcccacgggccatgggttagacaagcttgtgacatgctcaagattttgttttttgtttttgtttgttttgttttctttatgtaatatttcactttatgaaagaaaagaaaatgggcaggtcttagaaatctgacatttgtaaggttatattgggttgtctctgggctcatgagaaaccgtgtttactcctggaaagagtgtctacttctttccattaaccttatttttaccaattttcacaaaatccagctgattgtgggcaaatgcaggaagaattggatctgacaatctctgcagagacaagaaaacaaacagcatgtaaaccagagattgcatatggtgagttcaaaagttcaatatagctcctttaaacatgaaattttatgaatatgtgttcagttagaaagatcaaaaactttatatagtgattatatgaatacaacattccatgtgatcccctgaaggaaaatgccatcgatttttagcattaacatgcaaagtttttattcctcagcaaagaaatgtgattttcattataaataatagaagtgacatgtatacccagccaggatactttcccacaatagagctttttcaattacaggcactaaaacatagtcaaagggaacttttgagaagccacagaggtataagatttcagttctgtactcttccaattgatagaccagaggcagaggcaaaggtgatttagggggcttggtttttaaaaaaatatcttcagggtaaaaatataaataccaaataatttttaatatattcaagattgcaatccatgtttgagacactctccatttgaaaaagcaaatctcagtgcttctagttgtccagcgcttagagctaaattagtgttcaagtacagttgtagccttgtctcagttcctgataaaattagctcctttgttatctattcagtttttgatgtttattgctggcattttttgagagagagagagcatattgtacactatctcaaatcattttttcattttgaaattggaagggtggagccgggcgcagtggctcatgcctgtaataccagcactttgggaggccgaggtgggtggatcacctgaggtcaggagtttgagaccagcctggggcaaacatggcaaaaccctgtctctactaaaaatacaaaaattagccaagcatagtggtgcgtgcctgtaattccagctactcagcagggtgaggcgggagaatcacttgaacccaggaggaggaggttgcagtgagccaagatcgtgctactgcgctccagtctgggcaacaccagcaagactctgtctcaaaaaaaaaaagaaagaaagaaagaaagaaagaaagaaagaaatttgaagggtgttatttataaattaaaaaaataaacacagccaatttggtactttgtgtttagcaacagcttccataaacagtttctcattgcaatggaaagggttctcattcttacggaaagggtctcgtaagaacttcatgagggctgggtgcggtggctcatgcctgtagtcccagcactttgggaggctgaggcaggtggatcactttgagctcaggggttctagaccagcctgggcaacatggcaaaaccttgtctctacaaaaaatacaaaaattagctgtgcgttgatggctcatgtctgtagtcctagctacttgggaagctgaggtaggaggatcgcttgagcctgggaggtggagattgcagtaagccattgcactccagcctgagtgacagagtgagaccctgtcaaaaaaaaaatgtaacagagtattatcactatttaccagtgaagaaactgaggctcagggagattaaataatttgctcaaggtcatgcagaaagcaagtaatagaattaagatgcatcctgatctccagtattttttccatcgaagtctactgaattctcttaatagtaattcaggcaacagaataagttttatatggttaataacttttctttctttgaatttatattgattttggaaaaaaaaaaaagctaaaaagctgcctgactcagcctaggcccactgcagtttgttaaatacatgaagacttgagaatactatattgttttaacaaacaaaagttccactaaattatttcttccctccattttagaactattttaaatctaaaatatcagaaatctattttaacacagagaataaatgcaatttgggtttattgtgttgtttcaagaaaagacttcgctggctttttctggactacaagccagaataacagaatagaaacaaaattaagtagttctctctctgtacccaggcccacatagtaagtacattgcccatgtccattataaagacttatgaatctgaaagtcagaacacttttcatgcattttaagccactaatttacatagcccctggttctgccatgatgagttcacctagctacctctcaatcagtcaatctatatctgggatagacttaaagacttgagggatatctagaatgaacaaatcttttaggtcactaatttcaaaacaaaaaatagatcaaaagcaaaaataaaataaatctctcctgaggccacatagaaagaatgggtcccttcaagctggtctttccagacctgaggtcaagcacattatgcatcaaacattgatatctgaatgaagggaaaacaggattgtaggcagctcttgttaggtagttgccaagcaagggtgagtgagaaaacagaatcatcctaaaaaccaaggattaaagccagtggaactatatgaggaagcaaagcaaggaaccaagaaagctcacatggtagacctgaatgagagataaggcctcctctgtggccatggagaagagaatgaaggggctcttcaaaagatgcccatgggcatgactccactcatcttaaaggatcagcctctgaacttaacatctaacaaaggtttatcttgtttgtttgttttatgtgcttctgttattttattaaatatgtctcttattctaatcagcctgttctataacattggccagggctaatgattctaatagattgagagattgaatcagactgaggggattggggaaggcttcttggaggaaataagaactataatagtttgccatgcttcatttctcgtgtttgacaaattctggcttctactggacatagcattaatagtattaagactgaattgtttcattgttgtttgtcttttgccagcttataaagttagcatcacatccatcactgtagaaaatgtttttgtcaagtacaaggcaacccttctggatatctacaaaactggtgagaattcattcgttcattcgttccttcattcagcaactatttagtactgactatgtgccaggcattatattaaacacagaagatacaactcaaataagacagagctcttgcctttttaaagcttatattctacttggggagaaacattttttaaagatgttcgtataaatatttctcattgaattcatttttctaaaacttcagcaaaatgtttttttcaattgcgtaattgtccaatttctttttctttacaacttttattttaggttcaggggatacgtgtgcaaatttgctacatgggtaaattgcatgttttgggggtttggtatatagatcattttgtcacccaggtaataagcatagtacccaataggtaatttttcaatcctcaccctctaccctcaagtaggctctgctgtctagtgttcccttctttgtgtccatgtgtactcactgtttagttcccacttataagtgaaaatatgtgatatttggttttctgttactgtgttaattcacttaggatagtggctttatttctgggtgctgtaacctgttccattggtctacgtgtctttttttgtatcagtaacatgttgctttggttactgtagccttgtaatatagtttgaaatcaggtagtaggaggcatctagctttgttctttttgcttagaattcctttggctattcaagttctttctttgttccatatgaatattaaaatgtttttttctaattttatgaaaaatgataggaatagcattaaatctgtaaattgctttggacagtatggccattttaacaatattaattcttcctatccatgagcgtggaatgtttttccatttgtttgtgtcatctctgatttctttgagcagtgttttgtaattctcattgtagagatcattcacctccctagttagctgtattcctaggcatttttgtgtgtgtgtggctattgtgaatgggattacatttttttttttgaaatgacgtttcactctgtcacccaggctggagcgcagtggcacgatcttggctcactgcaaactctgtttcccaggttcaagtgattctcctgcctcagcctcctgagtagctgggattacagacatgcaccaccacgcctgacttatttttgtatcttagcggagatggggtcttacatgttggccaggctggtcctgaactcctaggctcaagtgatccactcgcctcagcctcctgaaatgctgggattacgtgtgtgagccaccgtgcctggcctcatttcgattgatataaattttgcaataagtaggaccataaagctaaattgcaataatatgtttatactaaatttttttctcttttgaaattctatcaaatatttcaagtcctaaaatgcttgattttttttcttttgagacggggtctcactatgttgttcaggctggtctcaaactcctaggctcaagggatcctctctcctcagcctcccagcttgattattactaaccataccctagagtttaaaattctagtaatatttttcaattttgtatttgctttatcaacactttgataattttttttaaatttttgttattttgaaagtttcattgtatgaaacttatttgtgaagttattttatttttttcttcattgatggtcacaattttttaatttgcaggctagttgccattctaatgaaataagtgtttagaactttgatgttgccacagtccaacttttgagcaacattttcatccaatgttcatattacaagcagtaataagccattctctttttactgaaataacaaagtgcttttcattccagaaatacaaattatttgttttatttgatactgattcttgcatagtatcaaaagacattttagactgttctgaatttttcatagcatcggatggttcccaagctacaatttttttattagtatcatttcttctttgttctcctgtagatccaaagatgcattttatgatatttaaaaggaaatgttaagaaacattggcatacttcatctcctcattctgggcccatttttaacacataaattttgaatttttataaatataaaaataccacacactacttacagaagaattgtggcacagtgaccataagccatttagaatcaagggcaaactgtagtttgaggataaggataaattggtatttctccaaagcacagagtgcttagaataggtaaggatatagaagaataaaagtttagttattgttgaagcccagggtagttgcctgttctctcttctgaatatactttaaattttccatgatgagaagcttaaaaaataataaggccccacacagctacactgcttactatgacaggggctgaaatggcagatagtactggtaatgttgctcagatattgacgtaataggaatctacaccatcagggcagcctaagaaatcagcttgaactaatgggtgtacactgaaatttatatcactaatgaaagtttaccatttacacagtttctattatacactatttgccaattggttcagaagtttttcaggacttaacaattaagatgactctgccagaacttaatagttaaatatcagccctgtatatatagcgataaatcagacacagtccatgccttaagaagtttctagtctagctagaaggacagatgtgggacaaaaaattgtgacagaaattcaagtgtaaaagaggtaaagaggagacagaaagatatttaaaacaaagagcatccaggaatattttactggatactgtgagaattgaaggagactttcaagataaatgaaattcaagaggccaacatggggaggaatgcattccaggtaggggaactggctacttgtgagttctttgagaatcccaaaattactatctttgaagttttccaagtctttcacattttgtacttttccacaaagttaacagttgccaaataccaaataattttatattttactatataatgtggagattaatgttgttcaactgtagagaggttcttttaattctggttatataagagtaataataagtacttacatagttcctactatgttccaggcacttttcatgtattaactcatttaatctcacgatggttctacaaggtaggttttattatcatgcccagtcttaagatgagggtctaaggccttatacagataacataaatcattttcccagagtcacatagccaggaagcagcatgcttagagtttaacccaggcagtctggctccagagactgaagccttaaccacatggatatcacggctgtccactagccatgaacctctcaatagccacgaggaaccagaaaacttgagagtttataattgtgacattaaaacatgaatggtataaccttacttgacttgcatgtctctcaggggaagctgttgctgagaaagactctgagattaccttcattaaaaaggtaacctgtactaacgctgagctggtaaaaggaagacagtacttaattatgggtaaagaagccctccagataaaatacaatttcagtttcaggtaagtcaccaatatttttcagtcactgatcttccctccaaaactgagtataatttattcttaaatacactacgtgtttcttatggccctgctcttaaccaacaaaccattttgaactaaataatattaatgtcaagcaaagaatgatttaaaaccatcgtggcagctgaggacttagctgcctgattaaccatctgagtgtctggacctgatgatgaatctgaaagtactcaccggacctcccctaaccaccacaccagctcccttgatagttctcagactgtttgtaaagaggaaaatgtgtaaatatgtattgtattatctgcttttagaaactagtcattgaaatagatgtactttctgcctttaatatgggagccccaggcagctttacaattccttaagggtttgtgaaccctccccaggagaggccggtacagaagagtttggcggacagcctgacccctggggacctgaccacagctgggctcttataaaataaatcaggctgggcacggtggctcacacctgtaatcccagcactatgggaggccaagacgggcagatcacaaggtcaggagatcgagaccatcgtggctaacacggtgaaaccccgtctctactaaaaatacaaaaaaaatagccgggcgtggtggcaggcacctgtagtcccagctactcgggaggctgaggcaggagaatggcgtgaacccgagaggcagagcttgcagtgagctgagatcacgccactgcactccagcatgggcgactgagcaagactccgtctcaaaaaaaaataaagaaatcaaattcagcttttctgttttgtggccacctcacaaacactttgtttcttggtaggtacatctaccctttagattccttgacctggattgaatactggcctagagacacaacatgttcatcgtgtcaagcatttttagctaatttagatgaatttgccgaagatatctttttaaatggatgctaaaattcctgaagttcagctgcatacagtttgcacttatggactcctgttgttgaagttcgtttttttgttttcttctttttttaaacattcatagctggtcttatttgtaaagctcactttacttagaattagtggcacttgcttttattagagaatgatttcaaatgctgtaactttctgaaataacatggccttggagggcatgaagacagatactcctccaaggttattggacaccggaaacaataaattggaacacctcctcaaacctaccactcaggaatgtttgctggggccgaaagaacagtccattgaaagggagtattacaaaaacatggcctttgcttgaaagaaaataccaaggaacaggaaactgatcattaaagcctgagtttgctttcaaactgtgctaaaaagcctgttattttatgctagatcagcttcaaccacacaaagacaggcaaattgagagagatggagaaagtcagcagtagagaaccttaaccttgagcgggcttagcctcagagccctcagcgcactgagaaggtaggtgggtttgtccctgccccctccccgtccattgccctctccatacccctgaagggagaccctctactctctttccctcccttccggcacatgttcatttcccccaggaacctgctctcgccaacaattgctttactaaaagacaggccccagtgcagcaacctggtgaaaagaaactgagtggcggatcgggagacctttctccagccctaaccaggtctctctctgagcctcaatttgagctttataaaagaggatacataacagaagttaatttttaagtgacattttgcagcacttcagatcatattaaaaagctctcgcatatattctcatttaatgtctcaagcctctcacaagattcagaaattattatcattatcatccccatcttacagataagaaaattgagatttaggcctggcatggtggctcaagcctgtaatcccagcactttgggaggccaaggcgggcagatcacttgaggtcaggagttcgagaccagcctggccaacatagtgaaaccccatctctactaaaaatataaaaattagccaggctaatttagcaagcctgtaatcccaggtactcagtaggctgaggcaggaggatcacttgaacccaggaagtggacgttgcagtgagccgagatcatgccactgcattccagcctaggtgacagagtgagactccatctcaaaaaagaaaaaagaaaaagaaaagaaaattgaggttcagaaaagtaaagcagttttcccaacctagtaaggaaaagaattggaaatcaaaccccaagactctatctcagtttaaatacatctctgttccacatcactacatattgcttgttgggttgaattttctaacagtaaggcaggatatagtagaagtttcttagacacagattaaccagccccactgaactatcacaggaaacatgaagatgacctccggatgtaacggtaattaacagagactggaatgcatctccttttgaagagtctgctttttactagttaggtgaagctacacaaggccttgtagtgtgcctttgtaaataacactaagattttccacttccagggactaaggacttatttttctctaatgtcaaagctcacattgtaggcactcccttggcaaaaacaaccaatgtgtcatgttcaagatgcccacactccctgtcagcgaggggtgaggagaccttctccagagcaggcctctcggtgtctcctgtcacttccttgctgggaggagggaaccactggtgctgcttcgaaggcacaggagtctgactgccttttcctgagcactttggcaaatagggcaggccacagtggcctaattaacccacaatgcagctgtcaaatatcaaagaaggttttgtgaattagcctggcaccatttaaaatatctgccagctcctcttcagctaactcctatgcatttgaacatattttctcagtgaggcttttgtgaccctccaaaccaggctgggcccattacccaaccctgcacttctcctccaaggcacttgtgctcttgcaatgatttacttaatcagattgaattattagtttagcgtgaccacactgaaagctccacttaggtaaggtctgagtctgttctattcgccagtatctcctgtagttggcacaatgtcgggcacatcatagggactcaataagtgtttgtggattcccctacagtgtagagaatcagaagacccaagttctagtcttggctttggccctaattggcagtgatttgggacaagcctcttaatctctttgatagcctataaaataagggaattggacactctaatgtctcttttatctatagctaagaagatgttctataatcttatgatgtgaaacaggaaaaaccaaacggcatataagcatccaaatattgggcttatgtatttcattctttctttctctcttttttttttttttttttttttgagacacagttttgctcttgttgcccaggctggagtgcaatggcgcaatctcggctcactgcaacctccgcctcccgggttcaagcaattctcctgcctcagccttccaagtagctaggattacagacatgtgccaccacacccagctaattttttgtatttagtacagataggttttcgccatgttggtcaggctggtctcgaacgcctgacctcaggtgatctacctcccttggcctcccaaagtgccgggattacaggcgtgagccactatggccggcctgggcttacatattttgtctgtaagtatggagacagtgcagagaagtaagctggaagagctgccaaggctttctgtagaaggacactgggatttgggtaggtgggaggtacagggaaggcctttctggttaaggggcaacgcttaaggcaggtttccccaggggtaagcaagatgttcttaggtgatacgatgcacattgttcactttagtggctatatgtttattttaacatgtattttaaaaaagtaattagcacatcaaagccatgatgtaacattttcttccaaaataaatctattttccaagaagtaagtctatttaagaaaaagtattgagtaaataaaagtaagtttattcttagggcaaaaatcatgcagttggcatgcaaatgattgacgtttaagatactctgtcttaagaaaacacgtggaggtctgtgagccaaggttgaggcaagcagccttgctccatatttctcagtgagaaattctggaccaaagtcatgtttagtctttctttccagaccctatgatgctgatgtattcagcaacacccaacaaacatgtattgattggtgactgcaggctaggcccaattctaggtgcttggtaccaagatccctgccattgtggaacatagattccaactgggagagatatgtaataaaaaataaagagaataattaagcaattagtcttggatctcagaaagtgataagagcaatgggaaaaagaaaaagcagactaaaggagactggtaatggtcaggggaggggttgcagttctaaatagggtggccaggtcagggtgggcttcaatgagaaggtgaaatttgagcaaagacttgaaggatgtgaaagagtgagccacatagctagccaaggggagagtgttcctggcactcttggtacatagtgtccggcctaaggcaggagca

SEQ ID NO: 104 - DNA, 5480 bp, Homo sapiens
tatatccgtggtttcctgctacctccaaccatgggccttttgggaatactttgttttttaatcttcctggggaaaacctggggacaggagcaaacatatgtcatttcagcaccaaaaatattccgtgttggagcatctgaaaatattgtgattcaagtttatggatacactgaagcatttgatgcaacaatctctattaaaagttatcctgataaaaaatttagttactcctcaggccatgttcatttatcctcagagaataaattccaaaactctgcaatcttaacaatacaaccaaaacaattgcctggaggacaaaacccagtttcttatgtgtatttggaagttgtatcaaagcatttttcaaaatcaaaaagaatgccaataacctatgacaatggatttctcttcattcatacagacaaacctgtttatactccagaccagtcagtaaaagttagagtttattcgttgaatgacgacttgaagccagccaaaagagaaactgtcttaactttcatagatcctgaaggatcagaagttgacatggtagaagaaattgatcatattggaattatctcttttcctgacttcaagattccgtctaatcctagatatggtatgtggacgatcaaggctaaatataaagaggacttttcaacaactggaaccgcatattttgaagttaaagaatatgtcttgccacatttttctgtctcaatcgagccagaatataatttcattggttacaagaactttaagaattttgaaattactataaaagcaagatatttttataataaagtagtcactgaggctgacgtttatatcacatttggaataagagaagacttaaaagatgatcaaaaagaaatgatgcaaacagcaatgcaaaacacaatgttgataaatggaattgctcaagtcacatttgattctgaaacagcagtcaaagaactgtcatactacagtttagaagatttaaacaacaagtacctttatattgctgtaacagtcatagagtctacaggtggattttctgaagaggcagaaatacctggcatcaaatatgtcctctctccctacaaactgaatttggttgctactcctcttttcctgaagcctgggattccatatcccatcaaggtgcaggttaaagattcgcttgaccagttggtaggaggagtcccagtaacactgaatgcacaaacaattgatgtaaaccaagagacatctgacttggatccaagcaaaagtgtaacacgtgttgatgatggagtagcttcctttgtgcttaatctcccatctggagtgacggtgctggagtttaatgtcaaaactgatgctccagatcttccagaagaaaatcaggccagggaaggttaccgagcaatagcatactcatctctcagccaaagttacctttatattgattggactgataaccataaggctttgctagtgggagaacatctgaatattattgttacccccaaaagcccatatattgacaaaataactcactataattacttgattttatccaagggcaaaattatccactttggcacgagggagaaattttcagatgcatcttatcaaagtataaacattccagtaacacagaacatggttccttcatcccgacttctggtctattacatcgtcacaggagaacagacagcagaattagtgtctgattcagtctggttaaatattgaagaaaaatgtggcaaccagctccaggttcatctgtctcctgatgcagatgcatattctccaggccaaactgtgtctcttaatatggcaactggaatggattcctgggtggcattagcagcagtggacagtgctgtgtatggagtccaaagaggagccaaaaagcccttggaaagagtatttcaattcttagagaagagtgatctgggctgtggggcaggtggtggcctcaacaatgccaatgtgttccacctagctggacttaccttcctcactaatgcaaatgcagatgactcccaagaaaatgatgaaccttgtaaagaaattctcaggccaagaagaacgctgcaaaagaagatagaagaaatagctgctaaatataaacattcagtagtgaagaaatgttgttacgatggagcctgcgttaataatgatgaaacctgtgagcagcgagctgcacggattagtttagggccaagatgcatcaaagctttcactgaatgttgtgtcgtcgcaagccagctccgtgctaatatctctcataaagacatgcaattgggaaggctacacatgaagaccctgttaccagtaagcaagccagaaattcggagttattttccagaaagctggttgtgggaagttcatcttgttcccagaagaaaacagttgcagtttgccctacctgattctctaaccacctgggaaattcaaggcgttggcatttcaaacactggtatatgtgttgctgatactgtcaaggcaaaggtgttcaaagatgtcttcctggaaatgaatataccatattctgttgtacgaggagaacagatccaattgaaaggaactgtttacaactataggacttctgggatgcagttctgtgttaaaatgtctgctgtggagggaatctgcacttcggaaagcccagtcattgatcatcagggcacaaagtcctccaaatgtgtgcgccagaaagtagagggctcctccagtcacttggtgacattcactgtgcttcctctggaaattggccttcacaacatcaatttttcactggagacttggtttggaaaagaaatcttagtaaaaacattacgagtggtgccagaaggtgtcaaaagggaaagctattctggtgttactttggatcctaggggtatttatggtaccattagcagacgaaaggagttcccatacaggatacccttagatttggtccccaaaacagaaatcaaaaggattttgagtgtaaaaggactgcttgtaggtgagatcttgtctgcagttctaagtcaggaaggcatcaatatcctaacccacctccccaaagggagtgcagaggcggagctgatgagcgttgtcccagtattctatgtttttcactacctggaaacaggaaatcattggaacatttttcattctgacccattaattgaaaagcagaaactgaagaaaaaattaaaagaagggatgttgagcattatgtcctacagaaatgctgactactcttacagtgtgtggaagggtggaagtgctagcacttggttaacagcttttgctttaagagtacttggacaagtaaataaatacgtagagcagaaccaaaattcaatttgtaattctttattgtggctagttgagaattatcaattagataatggatctttcaaggaaaattcacagtatcaaccaataaaattacagggtaccttgcctgttgaagcccgagagaacagcttatatcttacagcctttactgtgattggaattagaaaggctttcgatatatgccccctggtgaaaatcgacacagctctaattaaagctgacaactttctgcttgaaaatacactgccagcccagagcacctttacattggccatttctgcgtatgctctttccctgggagataaaactcacccacagtttcgttcaattgtttcagctttgaagagagaagctttggttaaaggtaatccacccatttatcgtttttggaaagacaatcttcagcataaagacagctctgtacctaacactggtacggcacgtatggtagaaacaactgcctatgctttactcaccagtctgaacttgaaagatataaattatgttaacccagtcatcaaatggctatcagaagagcagaggtatggaggtggcttttattcaacccaggacacaatcaatgccattgagggcctgacggaatattcactcctggttaaacaactccgcttgagtatggacatcgatgtttcttacaagcataaaggtgccttacataattataaaatgacagacaagaatttccttgggaggccagtagaggtgcttctcaatgatgacctcattgtcagtacaggatttggcagtggcttggctacagtacatgtaacaactgtagttcacaaaaccagtacctctgaggaagtttgcagcttttatttgaaaatcgatactcaggatattgaagcatcccactacagaggctacggaaactctgattacaaacgcatagtagcatgtgccagctacaagcccagcagggaagaatcatcatctggatcctctcatgcggtgatggacatctccttgcctactggaatcagtgcaaatgaagaagacttaaaagcccttgtggaaggggtggatcaactattcactgattaccaaatcaaagatggacatgttattctgcaactgaattcgattccctccagtgatttcctttgtgtacgattccggatatttgaactctttgaagttgggtttctcagtcctgccactttcacagtgtacgaataccacagaccagataaacagtgtaccatgttttatagcacttccaatatcaaaattcagaaagtctgtgaaggagccgcgtgcaagtgtgtagaagctgattgtgggcaaatgcaggaagaattggatctgacaatctctgcagagacaagaaaacaaacagcatgtaaaccagagattgcatatgcttataaagttagcatcacatccatcactgtagaaaatgtttttgtcaagtacaaggcaacccttctggatatctacaaaactggggaagctgttgctgagaaagactctgagattaccttcattaaaaaggtaacctgtactaacgctgagctggtaaaaggaagacagtacttaattatgggtaaagaagccctccagataaaatacaatttcagtttcaggtacatctaccctttagattccttgacctggattgaatactggcctagagacacaacatgttcatcgtgtcaagcatttttagctaatttagatgaatttgccgaagatatctttttaaatggatgctaaaattcctgaagttcagctgcatacagtttgcacttatggactcctgttgttgaagttcgtttttttgttttcttctttttttaaacattcatagctggtcttatttgtaaagctcactttacttagaattagtggcacttgcttttattagagaatgatttcaaatgctgtaactttctgaaataacatggccttggagggcatgaagacagatactcctccaaggttattggacaccggaaacaataaattggaacacctcctcaaacctaccactcaggaatgtttgctggggccgaaagaacagtccattgaaagggagtattacaaaaacatggcctttgcttgaaagaaaataccaaggaacaggaaactgatcattaaagcctgagtttgctttcaaaaaaaaaaaaaaaaaa

SEQ ID NO: 105 - DNA, 49201 bp, Homo sapiens
gctcagcgcagccactgcctactgggctcacacgctcctccggcctcagcctctcgagtacctgggactacaagcgtgagccagtttggctaattttggctaatttttgtagaaacggggtctcgccatgttggccaggctggtctccaactcctggactcaagggatccaccttcctccccctctcaaagttctgggattaccggagtgagccactgtgccctgctggcaaatttcttaaactgtctgtgcctcagtgacctcatttaataaagggaataattgtagcacactttttctagagctgtgaagattcaatggaataaataaggcaataaatgaatggatggggaatgaaggatgtgggtttcctccctcttgtctttcaataagctctcaccatcaacctcccattgcctgttctctctcttccccctctctccctctgtctctctctcagccaggaaacctggggtagggaggcttggagccagcgggtgcgtcgggaggctgcgggtactgactcgggccgcgcacggagattgcgggagaaggatccacaccgcggaagaaggatcagggtggagcctgtggctgctgcaggaggaggaacccgccgcctggcccacaccacaggagaagggcggagccagatggcaccctgcccaccgcttcccgcccacgcactttagcctgcagcggggcggagcgtgaaaaatagctcgtgcgcctcggccgactctgcagtgcgacgggcggagcttccagacgctccgccccacgtcgcatgcgccccgggaacgcgtggggcggagcttccggaggccccgccctgctgccgaccctgtggagcggagggtgaagcctccggatgccagtccctcatcgctggcccggtcgcgctgtggcgaagggggcggagcctgcacccgccccgccccccctcgccccgtccgccccgcgccgcgcggggaggaggaggaggagccgcggcggggcccgcactgcagcgccagcgtccgagcgggcggccgagctcccggagcggcctggccccgagccccgagcgggcgtcgctcagcagcaggtcgcggccgcagccccatccagccccgcgcccgccatgccgtccgcgggccccgcctgagctgcggcctccgcgcgcgggcgggcctggggacggcggggccatgcgcgcgctgccctaacgatgccgcccgccgcgcccgcccgcctggcgctggccctgggcctgggcctgtggctcggggcgctggcggggggccccgggcgcggctgcgggccctgcgagcccccctgcctctgcggcccagcgcccggcgccgcctgccgcgtcaactgctcgggccgcgggctgcggacgctcggtcccgcgctgcgcatccccgcggacgccacagcgctgtgagtagcgggcccagcggcacccgggagaggccgcgggacgggcgggcgtgggcgcgttccctggcccgggacgggaagcaggacgcgggccaggacgctcccagggcgaggctccggcgcggcacggcggccctgctaaataaggaacgcctggagccgcggttggcacggccccggggagccgaaaaaccccgggtctggagacagacgtcccacccgggggctctgcagacgccagcgggggcggggcgcggaggccgcgctcagctgggaggacaaacagtcgctaattggagaggaattgggatgcggcctggggctgcggggtacccggagaggtggggatggctgtagggggcggcagggaagagttccaggaggtgtctggaaaaggatttgatggatgtgcaagaattgggctgatgcttaggaaggggcgatgaggtgggtccagaagaaggggggtgaacggtgtgagcaaagaccgtgaggctggaggctggccacgggaggtgtgaggggtaggggcagggtgggaggtgggctcgcgggtgggctggggtcatgaagggcctcaggcgctctgctattgggttccaaggctatcctgagaacaggggtgaggggggattgccgtggggggttaaagccttgtcatgttcgctttcgggagataaaaacaacaggtggcctttatggagacgctgcccagagccaggtctgtgccaggctcctgttgggggtcgtcatgcggaatcctgactctgaccatccgaggcatagggaccgtggagatttgcatttcacagatgaggaaacaggtttggagaggtgacacgacctgtcccaggcatcacagccgggatgtgcatagcaggggtttggaactatgaggtgcccaggacccagggttggattgaaaagggcggaggggactaagataagcagacagttgtccccagcgctggggagagtcttgggaccagtctgatgccttgtatttcccaggctccaggctcctcgccgggacagtgtctccttgggtgcgtgctggatccctgggggacgtggcacatccccaggcttgctaaacattgggtgggttctggcatttggttttgtaacgtttctgggtcactcccgcctgtggccacccttccttaggggagccgtgtgtccttggggctttgctgggtggtctcgagggtgggagaagaatgggttctcctggaccaatggagcccgtgcccctcggggccacattgctcctgcgctccctgactgcggacgcgtgtgtctcgcggctgtctctgtggagatggcctcctcctgcctggcaacagcacccacagaattgcatcagacctaccccacccgttgtttgtgatgctgtagctgagggctcctctgtctgccaggccggtcactggggactctgtccagggcctggtggttcctgcttcccagcacctgatggtgtccatgagagcagcccctcaggagctgtccgggagagaagggcgctggtggctgctgagcggagagcaaggcccgtgttctccaggcccttggcacagcagtggagcccccgcccctgccttgtgttgtcctcttaggctctggtcctggggtttggaggagggggaccctgggagttggtggcctgtcccagcctgagctggcaagattccgaatgccaggccccccaagtgtgcaacagggcacagggtgacctcatgtgggcaggtgggtgctgttctgtacacacctggggccgccgctgggagagttctggaaggtggggtgaggggacccatggcaaactagggccttaggaaggatgtgaaggccctggctggccccccaggccaccctctgtgctgtggggcagcccagccattttgctgtctaccctgcaaactcctcctcggggagacggctgggttttccccagggaagaggggtcaagctgggagaggtgaaggacacagatcacagctgctggcaggtgttcaagggtccaagagcgttgctgtctgggtgtcaccagtagccttcctggggggctcacgcaggtgcctctccacttgtggctccctggctgctgaagctcagcagggacagctgtgtccagttccaggtggaggacagccggggcttctgaggccacagcctgccttgggttaatgatgctgccgagaggtggtggcttttggaaaagatggcgtactgcaaaacgtgctgctctgcgtggctcgaagcttcgtggggagacgtgggcagagccgtggctgactcacagaccccccaccccagagcctgccctgccctccctgccccgacccttctccctcctgacccatgtgttttttttttttttttttttttttgagacagagttcactcttgttgccaaggctggagtgcaatggcacgatctcggctcatggcaacctccgcctcctgggttcaagcgctttttcctgcctcagcctcccgagtagctgggattacaggcgtgcaccaccatgcctggctaattttgtatttttagtagagacagggtttctccatattggtcaggctggtcttgaactcctgacctcagatgatccgcccgcctcggcctcccaaagtgctgggattacaggcatgagccaccacgcccagccctgacccatgttttgaaccaaattccagccacccttttatctgcaagcattttggagggcatcgcaatactgcagacccacctaacacaacagacagttccttcatgccaccgaaggcctggtgtgttcacatttttggtttaatagtttgaattaagagccaaataaggtccacacactgcaattagttgatgtctttttttttttctttttttttttttttttgagacggagtcttgctcttgtctccaggccgcagtgcagtggcatgatctcagctcaccgcaacctccgactccctggttcaagcgattctcctgcctcagcctcccgagtacctggtagctgggtttacaggcatgcaccaccgtgcccagctaatttttgtatttttagtagagacggggttttactgtgttggccaggatggtctcgatctcctgacctcgtgatctgcccacctcggcctcccaaagtgctgggattacaggcgtgagccaccgcacccggccaatgtcttttaaaaatatatactttttttttttttttgagacggagtttcgctcttgttgcccaggctggagtgcagtggcgcgatctcacctcacggcaacctccgcctcccgggttcaagtgattctcctgcctcagcctctccagtagctgggattacaggcatgtgccaccatgcctggctaattttgtatttttaggagagacggggtttctccacgttggtcaggctggtctcaaactcctgacctcaggtgatccgcctgccttggcctcccaaagtgttgggattacaggtgtgagccaacgcgcccagacaaaaatatatgtgtgtctttaaggctggtcaagcaaagcagtaggactggagaaagaatgaagaattctacctggctgtgatcaattcgttgtgaacaccactgtgcttggaccagctagctgatgtcttttgttttgttttgtttgagacggagtctggctctgtcacccaggctggaggacaatggtgtgatctcggctcactgcagcctccatctcccgggttcaagcgattctcctgcctcagcctcctgagtagctgggattagaggcgcgcgccaccacgcccggctaatttttaaaaatatttttagtagagatggggtttcaccatgttggtcaggctggtcttgaactcttggccttaggtgatctgcttgcctcggcctcccaaagtgctgggattacaggtgtgagtgatgtattttatttatttatttatttatttatttttattatttgagatggagtctcactctgttgcccaggctggagtgcagcagtgccatctcagctcactgcaagctccgcctcctgggttcacgccattctcctgcctcagcctcctgagtagcctggactggtgcccgccaccatgcccagctaattttttgtatttttagtagagacggggtttcaccgtgttagccaggatggtctggatctcctgacctcgtgatcctcccgcctcagcctcccaaagtgctgggattacaggcttgagccaccgcctgtcttttaaatgtccgatgatgtctaggagcttcccttcctctctttttccttgtgcaatttgttgaagaaactggctcctgcagcctggatttctcgctgtgtcttgggggtgccacctccatggtgtcacctccgtggtgctgtgagtgtgtgctttgtgtttcttgtaaattggtcgttggagccgacatcccattgtcccagaggttgtcctggctggcactggcctaggtgtagatgtcatcagctcagggccccctgctctaaaggccacttctggtgctggttgccactcaccctggctgggggtcacctgggtctgctgctgtctcgcaaatgctggggtccaggactgggcacatcgagggacttggtaggtgcttggttcactgatgtaaaatataggagcacccggggccttgccctttcccacctgcatccctgaatgacaggagagtgtgggagagtgtagggacagcaggcgcagaccccggggcccctgcctgggattggcgtcggggaagacaggcattctggagcgacccctaggcctgatgccttagagcgcaactgccagagacacagcttccttggggggctggccaggccacggaggggcccctggctcccatttctggtccctggatcctgagagcgaggactagggattgtcaccaaggcctccatgagccctcagcagaaggagggccaccctcgagggctccgttatcactggagcccgcgttcaaccaacacgcagatgattctccaaggacagagatggatgatggggagggggctggcctggaaggacccccagtgcaggtgacattgaagccaggtttcaaagctcccacagggagctgcccagagagagtccccaaggggcaaggtgactcgggggcaggggtagggcctctgtcaggagagcctaggagaggcctgtgtcttctaggaagagccctggcagccgagcggaggcagtggtgaggacctgcatcctgcatgtccagctggcctcacccggggtccctgagccgggtcttacgtggctcccgcactcgggcgttcagaacgtgcctgcgtgagaaacggtagtttctttattagacgcggatgcaaactcgccaaacttgtggacaaaaatgtggacaagaagtcacacgctcactcctgtacgcgattgccggcaggggtgggggaagggatggggaggctttggttgtgtctgcagcagttgggaatgtggggcacccgagctcccactgcagaggcgactgtggagacagagagcacctgcaggtcatccatgcagtatcggcttgcatccagatcatacagggaacactatgattcaacaacagacagggaccccgtttaaacatggacaaggggtcactcacgcctggaatcccagcagtttgggaggccagggtgggtggatcgcttgagcccaggagtttgacaccagcctgggcaacagggtgagaccccggtctctaaaaaataaaagaacattggccgggcgtggtggtatgcatctgtggtcccagctattcaggagactgaggtgggacatcacttgagccgaggaggtcaaggctgcagtgagctgtgatcacaccactgcactccaggctgggtcacagagcaagaccctgtctcaaaaaaaaaaaaaaaaaaaaaaaaaaatcacaggatctgaacagagatttctccaaagaagacgcacagatggccaacagcgtgtgagaagatggtcggcctcattagtcatgagggaaacgtaaatcaaaaccactgtccagccgggcgcggtgcctcacgcctgtaatcccagcactttaggagagcagatggcttgaggccaggagtttgaggccagcctgggcaacatagcgagaccaataaatagatattagtggtggcgcctgtagtcccagctagttgggaggctgaggggggaggattccctgagtctatgaggttgagactgcagttagctgtgatggtgccactgcactccagcctgggcgactaggaaacggtctttaaaaaaaaaaaaaaaaaacagggtgggcgcggtggttcacgcctgtaatctcagcactttgggaggccaaggtggggggatcacaaggtcaggagtttgtgaccagcctgaccaacatggtgaaaccccgttctactaaaaatacaaaaattagcgaggtgtggtcgtgggcgcctgtaatcccagctaattaggaggctgaggcaggagaatcacttgaacccgggaggcggaggttgcagtgagccaatatcacaccactgcactctagcctggtcaacagagcgagactctgtctcaaaaaaaaaaaatgctgagcgtggtggcgcatgcctgtagtctcagctactttgggggctgaggcaggagaatcgcttgaacctgggaggcagaggtcgcagtgaggcaagattgcaccattgcactccagcctgggagacagagtgaaactctgtctcaaaaagaaaaggtctaggaagagtccgcaccctctccccgcggtggccacgccgggctccgcgctgagccctctgtgttcttgtctctccatacctcatcacggcaccgcagggttgcagccactcctggtctcattttacacaccaggaaattgaggctctttgagaagccgtggtgatgatttcatcagcatgctctggggcagacccctgcagccgcacagggtgcctggggcccacactagtgccctggtttatagacagacagaggtggcagtggcgcttccgagtcgggctgcgatgtgcttgcactccccgaggggctgaggggccctgcgcccaggtgcagctgcttgggtgctgccagcccctcccacctctccctccctgccagcccctcccacctctccctccctgccagcccctcccacctctccctccctgccagcccctcccacctctccctccctgccagcccctcccacctctccctccctgccagcccctcccacctctccctccctgccagcccctcccacctctccctccctgccagcccctcccacctctccctccctgccagcccctcccacctctccctccctgccagcccctcccacctctccctccctccagcccctcccacctctccctccctgccagcccctcccacctctccctccctgccagcccctcccacctctccctccctgccagcccctcccacctctccctccctgccagcccctcccacctctccctccctgccagcccctcccacctctccctccctgccagcccctcccacctctccctccctggctcatccctgctgtgtcccttctctctagtttcctgttcagtttcaggaaggaggctgggaacccagatgtagggaatttgcgccctggagtcagacctgggttcacgtcccagcgcctccacctctggtgtgaccttggtccagtctctcagcctcagtttcctcacctgtaaagtgggctccatgattagatgcaccctgcagggcagtgtagcagtgacctggctcagccactggcagccccaacaatcataccttgttaaagtagctctgtcggttccctcaggggttccgggggcccattcccctgtcctccatgcactgtgagacctgccctgccacagagcagagtgtaacagcctgagggtgagagccagacactgtgcctgtgcttagaccagacactggacgacgggagccagtgcagcctgggcgggtggactcctatggacccctcagcacccagcctcggtgccttcagcgcagggccgcgtggctgtgggggctcacaagacccggcccactcctgcttgtgcctacatctgggtgtttgcccattggtgccttttgacgcgttctggtgtgtgtgagacgtgcggggctgggaagtgttggcagagccgcgagtaccgtcctcactccttttgttcttttgacgtaagctggcgagtggcactgcctgagttccgctcagtgcccgccctgatgtgcggaccccgctgcattcttgctgttaggtggtggcggtgtgcgctgtcgctggtgggcaccgagagtctttgggagctttggggaggttgtgccaagcctgagcctcgacgtcccccttcccggctttctgttggctcttctgaggccagggcatctctatgagggcctcctgctggagccgtctctgtggatctcctctgccatcctggcccatgagtgggtgatgcgctggccaccatctggtgacagtggccgggcaccgctgccaaatgtgggtcccgcatctgcaagcccctccctgggtcccctagggtatggggtggttctgccactgccctcgctcccccaccttggggtgcctctccccctgctcgtgggggagaccctgcctgggatctgctttccagcaaggaatatactttggagggagacacacatgttcttttctggagctctgcagtggccacggcagcccagcccgccaagcaccctggaatgaaaacatcccgctgctgtctgggcctggcctgcactctgctgcctgcgctccagctggctgaggccgggcacgtctgcgggcacagcagcgggggcgccacagtctccctgcagagtgagcgcagctggaaaatgcagctcacgccctttcccagaacacctcgctcttcatggcttggcagctgtccttgcctaggggccagggtgcccaggcactggtggcaggagaagggctacatctggggctgaggcgggctgggtccttttctccctgcagctcccgaggcccagccctggcccagcctggcattcctgaccttagcagcgccatgatctgaagacaggctggcttctgtgaggccacctcagaaagggctttgtgcccaggcagaggcggaagccagctcttccttctggttgaggcaggaatgaggccagcgctggggcaagcccatgcccagggaacgtcacagctgtgggagtacaggggctccgggttctgagcccgtccactgtgcatcgtggccctggcctcaggatggctcgtaccatcattggctgtgcccacagccgagtgggtgatgggattccggctgccccgctggatctgtgctgctgccctctccagggcactgctgtgcccgcacagccgggcgcagatggccagtttgcttgcccccccccccaccatcctcttcctaccttggcttcctccattgacacactggaccctgctggctgcccggggaggtgtttgggggatggtgttgggggaggaggagggccccttgagcctcagtgtgcccatcaggagcgtaaggtcagtgcagcacctgcccacacaggctgtgaagggtgggagtggagagggatgcaagggggtcacaacgcctggctccatgtcagctgcgtgcaggggcaccaggagccggccctcattctccccttgaactggaagggtggccccgaccccagcggcaggtagcatacgtatgaagcgctctccttcctacaccccacaggtgggctcgtctccagacggccctttttgagctggctgtgtttttccatctgtgtaggcaaggacatcgcagactcccctttctcatctccctcgttcagcctccgaggccggagtctccatccctgtgcctgcctgtgggtcccgggaggacctgaggctgcccatgtcacccccggcatctcatcctggggacagttcagccgtgggagggatctgtaaggacagaatgccgctgagcctggggctccccagctagtctcacaccccgtgtctgggacccagagaccctcgtgcagggctctgttgcttggggcctggcagcctcgtcctgtatcagaggctgccacccccacccctcgtggggccagggttgtggccggcctccctggccctccccatggaagtggtaggcggagccagcagccatctgcccagcccggggctgcactgttttttttcaaatgagcaccgtcccaaactgcagcccgttaatttaaacaggatcatttccggccctggaagccgcctcactctccttaaatagaaaggagcacagcgcagagggaaacagatgaggtcatggctcggctggcccagcgaggaaggggccgcagtgggggtggcactgccgcctgtcccctgtcctctccagcgcccacactgcagcccatttcctcaccctgggcctgctctcgggagggacgggcctgggggtcctcttgctgggcggaggggaaccagctcctccaggagaggacggggcctggcagggggcatggggcctccctgggtctggcgtcctgtcctgcccctgccgagggaggagcggttacataagctccgcaggcggcccctccgagccggtccccccagcccagtttccagtgaggcggccagcgcgggcgggggtgccgggcctggcgcacacccgctgctgaccacacgtgtctggaatgtgcagatgtttctttgggggctccgtccggcccccagaccccactcagcatctggtctggggagtgggcgcctggggcactcagctctgagtgtgagactctgaggcaggtctggtttgtctggggccattccctctgctgtggattgggagggccccgggagctgccccacacccagggaagttctcctcagtcccactgttgcattccccgaccccggctcccccggcccaggagcgcctgtggggcagaaggcccagccccaagacttcccggccctgccagcctcaggcttcacccaccctcgcgccaactgtgggcagagcccagggggagggcaggagagccagcgcctggctgggaacacccctgaggggccgaggctccagggcgagggggcccgacctggggttcacacgcccgggtggcgggcagacccgctgcagcatgagacacgtgtcagctacctcgggccggcaggctggccctgctgcccacagccctgggacgtggccccacctgtgacgggtgtggaggggcagcctccaggcctggccacaccctctgctgttgctgctcctgctccaggattggcaagggtgctgggaaggggtgaagacccgtactgtggccacacacctgggacttccttctccacccagtggtgccccagcagccgctaaggagcccgctgggtcccacgctaggatggtcctaactcctcccgccttccagatcggacgctcggcgctggggaccccttgtgtcccggggctggggcaccgtcctgccccccatgggggtgtactcctcccgacaagcttggcttcagcttccctgggagcacatcctggccctcgggcacccatcaggctgtccctgtgcacctggctcccacccttccagctcatagcaggaactggggtgaggagtgcgtggggcagcaagggcctgggaccccagaggaccctgcactctgctctgtgctcttgcctgggcttagggccgctcggtggtcctgctgccagatgcctgggccctgctgtgtcccccatccttgcagggaaccagaacgtgggggcagggcatcagacagcggcgatgatgtcacctggcgggtgcagaggaagcccgaggggcggggtgggggggctggcgcgaggctgcctggctaggccttggcgttcccccagaacggcgatggcaaaagcagatggagacgtgaaaaagtacgggagcaagcgaggtgaggactccacggggacccctgtgctgttccctgtccctgaagcccacacctgagtcctgcccagggcagatgcttccacacccagggggcacctgagtcctacccagggcagacgcttccacaccctgggggctgggggactgcacctggctcctgtctgggccccagcttcattccactgccctgggccctgggagctcggccgagcggggtccccaagaccttgctgcatttctgggccttgggctggggtgagggccgggagaaggagccagcctggagcctggcacgcagggagtgcatggccagaaccggtgacaggcagggctgcctgctggcgtggaagaagtgtccatggcacccccaggcctggttcacagtgggatgggcggggagccggggggctctggggtcctcggctgacctgcccccacccctgccctggcttgtcagctcccagcagcagccactcttgatggattttccagaaaatgaggtgtggccaaacatcttcaggcttttccttctttcctttctcccgtggcctgggtgggagctgctccccatgcctgggggcaggtgcgagagcctgtgcccctccctggggcagtttcacagctgtgtcccttccagggggcctgcctgtgttcaccgtggcctctgcagcacctctcgccccttagggctcctgcgcctcgggtcccggtgcctcatttctccctaaagcattggttctgctgccgccgcagccgctggaaagtccctcctcaggtctaactgcagttcctcacggcacagtgttccccctcgggcatggtgcttgggcagtgggtgtgagtccagctgcctcaccctgtctcgagaatggcctcttgctggtctcccagccaccaccctgtcccaccccacggcggggatggtgtggatgcctagcagcgcggctgtgggcccacccatccttatgggcagtggggagcacctcagcccgtgtccctaccttggtgtagaggaggggacggcagagaagcagggttcagttaggggggaagtggtggccctgccggaggggccgttccctgtgtgcctggcccccagatcctctcccctcccggagcccagggcacaggcataggctctctgagtgtcccacagcccctgggggaagggaactgcacccccaaccgtgccctccatccgcagatggaacgagaagctccgggagccagtgcccagcgtctcatctgtctgggcacccagcccaggtgagggcctggctccaccgtccgtggctggtgctgcttcctggcacggagaaggcctcggctgctctgtcccctcagctggggtggcctctggtccccttctttgttggttcccttctcaagctcttgccctggccccgggccccaccgggcagcctgtgtgtgcgtctctcctgcgccgggtaggctcctgtgggagcggagctccggtgggaggagcagggctggaggctggcaggggctgggcgggtgttcagggatggaggccgccccggcttggggctggctgccgggtggtcattgctgggaagagcaagtctaggcggaggcacctgctgggtcactcgtggggagggtgacacctggggaagtagaggcccgtggcaggaggtgaggcctcggggtcctggggagcaggggggtggtgtgcagacctgcggagccatagtcctgtgccaggagcactactgggagtgcgtgggaccaggaggggtgcccagggtgggcggcagagtgacccccgaggtgcttgaggccgaggggaggtggagttctcggtttgccccagctctctgtctactcacctccgcatcaccagctccaggacctggtttgtaactcgggcagctctgaaaagagagacatgctgccgccctgtggtttctgttgctttttcttcactgactactgacatgggatgtttttcctacggctgtgaccaattgtgcttcttctaattgcctggtttttctttttttgtttttggagttttctctttctttcctccctccctctcaccctccatcctttttttttttatttttattttttgagatggagcttcactcttgcaggatggggtgctggagtgcaggggtgcgatctcagctcactgcaacctctgcctcgcgggttcaagtgattctcctgcctaagcctcctgagtagctggaattacaggtgcttgccaccacgcccgactaattctgtagttttggtagagacagggtgtctccgtgttggtcggtctggtcttgaactcctgacctcaggtgatgcgcccgcctcagcctcccaaagtgctgggattacaggcaggagccattgcacccggctctttccccttctccttttcttctctctctcctccctttctttcttttcttttcttttttttttcttttgagatggagtctcgctctgtcaccaggctggattgcagtggcgtgatcttggctcactgcaaccttcgcctcccgggttcacgtgattctcctgcctcagcctcctgagtggctggcactacaggctcccgccgccatgcccggctaatttttgcatttttagtagagacagggtttcaccctgttggccaggatggtctcgatctcttgatctcatgatccacccaccttggcctcccaaagttctggcattacaggagtgagccaccgtgcccggccatctttctttccttgctttctctttgttttctttcgagaccgggtcttgctctgtcgcccaggctggactgcagtggcacaatcatagctcactgcagcctcgacttccctggctcaagcgatccttcctcctcagccccccgagtagctggaactacagttacacactaccatgcctggctgattctttttttccttgtagagatggggtcttgctatgctgtccatcctggtctcaaactcctggccttcccaaagcactgggtttacaggcataagccaccacacccagtttccttttcttctttttaactggaatagttgacgttttctttattagctgtgtgtcaggagggtatttttggcctttagtatgtcgtgtaagttgctagtgcttttctgagattgtagtttgttttctaattttatttatattttgcgtagaagttgtgtattttagatggagttaggtcggctggtctttgatgttttatttattaattatgtatgtatttatttatttttgaggtagagtctcgccgtttcacccaggctggagtacagtgatgcgatctcagctccctgtagccttgacctctctgggctcaagtgatttttctctcctctacctcccgagtacttgggaccccaggcgcatgccgccatgcctggctaatgtgtattttttgtagatacggggtctcactgtgttgcccagggtggtttcaaaatcctgggcccaggcgatccttccgtctcagctcccacggtgctgtgttaccggcgtgtgccccagtgcctggccgtcttggaggtcttgtttctctgggtttatgcctcgaggtggcgcctgctcccctgtgctccctggtagcctggtagtgagcctgcttctcacacagtcatacctggttgtggtcccacagtgggaccaccctgttgggttcagaacaggagatgggggcccctcgagtctgtgtgggggctgtggacagggttgggagaccttggctctgtgggggactgtggacaggggatggggggccttggccctgcgtgggatgggttgggggtccgtgcccttcctggccctgggtggacaggtccatgtggcactcggcatagggctgagatgggtgcagagggctgaggcccccaggcctctcctggcttggtttccccagatgagtgttcatttgggtcttccatcagaaagtcccctcctgacctctgggagtggggagctcaagggtgggaggccatagcttggggatgctggcaatgtgtgggatgggcccagggatggcctctggcctactaggggctctggccctgacccacggccactcactcctcagagacgtctcccacaacctgctccgggcgctggacgttgggctcctggcgaacctctcggcgctggcagagctgtgagtgtcccccagtcgtgccagcatgcggggctcactccgggtgggctggcggcaccgcctcttgctgctcagctgtgggggcttccatcagctttgccgaatcccccgtctcttccagggatataagcaacaacaagatttctacgttagaagaaggaatatttgctaatttatttaatttaagtgaaatgtaagttgtggttctttgggtggggtcctggctggaccccaggcccccaatatcccttctgccctcccagttggtccgtgtccccttccaggcttgagaccagatcctgggggcagttcactgcctgcttggagccccccagtgccggcttggttggggcaggggaggcggtgctgtcagggtggctccagggcctggttgccagtggggggctggcatagacccttcccaccagacctggtccccaacacctgcccctgccctgcagaaacctgagtgggaacccgtttgagtgtgactgtggcctggcgtggctgccgcgatgggcggaggagcagcaggtgcgggtggtgcagcccgaggcagccacgtgtgctgggcctggctccctggctggccagcctctgcttggcatccccttgctggacagtggctgtggtgagtgccggtgggtggggccagctctgtccttcccagccaggtgggacctgggccctgcagacactgggcagggctcaggaaggcctctctggggggggcctccgggccaagggaacagcatgggagcctgtgagtgcggcgggcggatgtgggggcgtggggtggagccaggaggagcagaacccggggtccagtggctgcctcttctaggtgaggagtatgtcgcctgcctccctgacaacagctcaggcaccgtggcagcagtgtccttttcagctgcccacgaaggcctgcttcagccagaggcctgcagcgccttctgcttctccaccggccagggcctcgcagccctctcggagcagggctggtgcctgtgtggggcggcccagccctccagtgcctcctttgcctgcctgtccctctgctccggccccccgccacctcctgcccccacctgtaggggccccaccctcctccagcacgtcttccctgcctccccaggggccaccctggtggggccccacggacctctggcctctggccagctagcagccttccacatcgctgccccgctccctgtcactgccacacgctgggacttcggagacggctccgccgaggtggatgccgctgggccggctgcctcgcatcgctatgtgctgcctgggcgctatcacgtgacggccgtgctggccctgggggccggctcagccctgctggggacagacgtgcaggtggaagcggcacctgccgccctggagctcgtgtgcccgtcctcggtgcagagtgacgagagcctcgacctcagcatccagaaccgcggtggttcaggcctggaggccgcctacagcatcgtggccctgggcgaggagccggcccgaggtgagtgtctgctgcccactccccttcctccccagggccatccagatggggcagagcctggtacccccgtcttgggcccacactgaccgttgacaccctcgttcccaccggtctccagcggtgcacccgctctgcccctcggacacggagatcttccctggcaacgggcactgctaccgcctggtggtggagaaggcggcctggctgcaggcgcaggagcagtgtcaggcctgggccggggccgccctggcaatggtggacagtcccgccgtgcagcgcttcctggtctcccgggtcaccaggtgcctgcccccaccccccgaggggccataggttgggagatctctgaagcactggggcagagcctgcggctggggagtctcaggaggaaggaggtgggagctgggccggccctggtgagcaggtggcgccggccggtggggccgttcctgtcagctctgcagatgcagaggtggacatgagctgggggcagcctccggacactcctgggcacgccatacgggaggtggcctgcacggggatccctgccggtacccacaggccccgtgggtgggtgctgctgtgagcctgggctggtgggccctggtctccgggctctgagcctcagtttccccatctggaaagggggacagtgatggggctcccagcgggctgctgtgagggtgggaggatggaggagtgccctgagccccctgccatcccacacccgcccccaggagcctagacgtgtggatcggcttctcgactgtgcagggggtggaggtgggcccagcgccgcagggcgaggccttcagcctggagagctgccagaactggctgcccggggagccacacccagccacagccgagcactgcgtccggctcgggcccaccgggtggtgtaacaccgacctgtgctcagcgccgcacagctacgtctgcgagctgcagcccggaggtgtgcggggggccaggcaggggcctgagacgctggctgtggttaggggcctgccgagcgcccgcggtggagcctgggctgaggaggaggggctggtgggggggttttcgggcggctcggtccccagtctgttcgtcctggtgtcctgggccctggcccggcgcctcactgtgcactcgccaccccaggcccagtgcaggatgccgagaacctcctcgtgggagcgcccagtggggacctgcagggacccctgacgcctctggcacagcaggacggcctctcagccccgcacgagcccgtggaggtagtcggccccccacgttctacaacctgccctcctgcctgcccctggaggccttgcctgccctgcccactgtgggtctcgccaaaaaacttgggggccttaatgttgcttgtgcccagtgaagatggttgggaaaatccagagtgcagagaggaaagcgtttactcacattacctccaggccttttctctgagcgtgtgtgagttattcctgaaaggcaggtcaggggtcctgccccccatggacagtttccaccggagtcttcctctcgagcgacaggagccaggcctgtgggggtctgatggctcgctctccttccctcccctcttcctgggaagttcgggtagggggagtctgggcttcaggctgggatggggtctgtggagctgaggcggccccctgcccaccaggtcatggtattcccgggcctgcgtctgagccgtgaagccttcctcaccacggccgaatttgggacccaggagctccggcggcccgcccagctgcggctgcaggtgtaccggctcctcagcacagcaggtgggactctgggtggtgggtggtgggtggtgggcgccgcaggactcggggtggcctctctgagctttcacgtctgctggtcctgtggccaccagagtggttcccagtcttaggtggacagagcaggggttccagagacaccagctcattccaggtgtcctgggggtggattgggtggggcctgcctgggggccggcctgggtcagtcggctggccggagacggacgcagcactgggctgggagtgctgcccaggtggggagacctgtcctcacagcaaggccaggattgctggtgcaggcagttgggcatctctgacggtggcctgtgggcaaatcagggccccaacaccctcccctcctcacagggaccccggagaacggcagcgagcctgagagcaggtccccggacaacaggacccagctggcccccgcgtgcatgccagggggacgctggtgccctggagccaacatctgcttgccgctggacgcctcctgccacccccaggcctgcgccaatggctgcacgtcagggccagggctacccggggccccctatgcgctatggagagagttcctcttctccgttcccgcggggccccccgcgcagtactcggtgtgtggccctgacctgggtctgttccctgcatctcctcaggccaccttcctgtctgctgcccagggtctgggtctgtgcaccagacacacccagcctgcaggcccctcccacgtccttgccacctctgacctccgacctctgcagtgccctcggccctctcccagtgggagaagctctcgcctgggcccttggcacgagctgtgcctcctcttcctctctcccagcacagctgctccttcctgtctgccaggtcttggcctgtgtcctctccccgtgtgtcccccggtctgcaactgtcctgcctgtccttgtcacgagcactgtggggaggctccttgaggtgtggctgacgaagcggggagccctgcgtgtccaccctcatccgtcgtgcgggggtccacgggccatgaccgtgaggacgtgatgcagccctgcctccctctccacaggtcaccctccacggccaggatgtcctcatgctccctggtgacctcgttggcttgcagcacgacgctggccctggcgccctcctgcactgctcgccggctcccggccaccctggtccccgggccccgtacctctccgccaacgcctcgtcatggctgccccacttgccagcccagctggagggcacttgggcctgccctgcctgtgccctgcggctgcttgcagccacggaacagctcaccgtgctgctgggcttgaggcccaaccctggactgcggctgcctgggcgctatgaggtccgggcagaggtgggcaatggcgtgtccaggcacaacctctcctgcagctttgacgtggtctccccagtggctgggctgcgggtcatctaccctgccccccgcgacggccgcctctacgtgcccaccaacggctcagccttggtgctccaggtggactctggtgccaacgccacggccacggctcgctggcctgggggcagtgtcagcgcccgctttgagaatgtctgccctgccctggtggccaccttcgtgcccggctgcccctgggagaccaacgataccctgttctcagtggtagcactgccgtggctcagtgagggggagcacgtggtggacgtggtggtggaaaacagcgccagccgggccaacctcagcctgcgggtgacggcggaggagcccatctgtggcctccgcgccacgcccagccccgaggcccgtgtactgcagggagtcctagtggtgagtatggccgaggctccaccaccagcccccaggcaggtgcctgcagacagggtgctcacacagggcgtgaggcctggcttcccagtgagggcagcagcccagttactggggacgtcggccccgggcaggtcctgctggctggctcctcgggctacctggtgggctttaaattcctggaaagtcacggctctgacagtggctccgctaactcattccactgtctcatttcacaaaatgaatttaaaactctgctccctgacctcacacgagcccccgtgagtctctcacgccctctgctgtgttctcgcctggctaaagcgagtggcttttgaggtggagtctgaacccctgatgggaaactgcgggctgcccgcggtgccaccatgctgggtacatgggggacagggctgtctccatcttgcgggtacctgcctcttcaccaggggccttgggaggggccatcagaaatggcgtgacctgtgcagcctgtcctgggttctgtaagccagtgtaggtgcctcccctcactgctccgagctctctgggtgaggagctggggcaagagcgccgggagggtctgagaagactcagagagaggtggactctttgtagctggtactaggtttgctttacagatggggaaactgaggcacagagaggttgaggcattagtagtactacatggctggctggagagccggacagtgagtgtcccagcccgggcttggctcccatggcatgcagagccccgggcacctcctctcctctgtgccccgcgtgggactctccagcccgacgggaggtgtgtccaggaggcgacaggctaagggcagagtcctccacagagcccaggctgacaccattccccccgcagaggtacagccccgtggtggaggccggctcggacatggtcttccggtggaccatcaacgacaagcagtccctgaccttccagaacgtggtcttcaatgtcatttatcagagcgcggcggtcttcaagctctcagtaggtgggcgggggtggggaggggaggggatggggcggggcagggcgggggcgggctccaccttcacctctgccttctgctctgcttcatgctgcccgaggacgctgccatggctgtgggtgagtggagggagggacgccaatcagggccaggcctctcacctgccacctgggctcactgacgcctgtccctgcagctgacggcctccaaccacgtgagcaacgtcaccgtgaactacaacgtaaccgtggagcggatgaacaggatgcagggtctgcaggtctccacagtgccggccgtgctgtcccccaatgccacgctagcactgacggcgggcgtgctggtggactcggccgtggaggtggccttcctgtgagtgactcgggggccggtttggggtgggcaccaggctcttgtcccagccccagcctcagccgagggacccccacatcacggggttgcttttctgagcctcggtttccctgtctgttgggaggtaactgggtgcacaggagccctgaggctgcacgggagccgggagaggcctcagcacagccgggtgggccctgaatggaggcccggggcgtgactgcagagtggagcctcggctgggtcccaagcaccccctgccccgccaccgcccacccctgtcccggttcactcactgcgtcccaccgccccggcaggtggacctttggggatggggagcaggccctccaccagttccagcctccgtacaacgagtccttcccggttccagacccctcggtggcccaggtgctggtggagcacaatgtcatgcacacctacgctgccccaggtgagggatgagggggtgagggggccactgcctttcaggctctgagcacggggtccccccagctccccagtcaagctgccccccttcctccccaacagccctcactgtgacctcacctgggctgatggcttaggcccctactggggtgagggaggggccaggcgtggggggagtggacagggaagctgggcccctgaactgcgccccccgccctccccgggcctggctcttgctgctctgctgccccgagtgcagctgcacttggaggcggtgccgtcctcgccaggcagccctcagtgctgctacacctgtgctccgtcccgcacgtggcttgggagcctgggacccttaaggctgggccgcaggtgcagccgttcaccccgggctcctcaggcggggggcttctgccgagcgggtggggagcaggtgggggtgccgcggctgccccactcgggcctgtccccacaggtgagtacctcctgaccgtgctggcatctaatgccttcgagaacctgacgcagcaggtgcctgtgagcgtgcgcgcctccctgccctccgtggctgtgggtgtgagtgacggcgtcctggtggccggccggcccgtcaccttctacccgcacccgctgccctcgcctgggggtgttctttacacgtgggacttcggggacggctcccctgtcctgacccagagccagccggctgccaaccacacctatgcctcgaggggcacctaccacgtgcgcctggaggtcaacaacacggtgagcggtgcggcggcccaggcggatgtgcgcgtctttgaggagctccgcggactcagcgtggacatgagcctggccgtggagcagggcgcccccgtggtggtcagcgccgcggtgcagacgggcgacaacatcacgtggaccttcgacatgggggacggcaccgtgctgtcgggcccggaggcaacagtggagcatgtgtacctgcgggcacagaactgcacagtgaccgtgggtgcggccagccccgccggccacctggcccggagcctgcacgtgctggtcttcgtcctggaggtgctgcgcgttgaacccgccgcctgcatccccacgcagcctgacgcgcggctcacggcctacgtcaccgggaacccggcccactacctcttcgactggaccttcggggatggctcctccaacacgaccgtgcgggggtgcccgacggtgacacacaacttcacgcggagcggcacgttccccctggcgctggtgctgtccagccgcgtgaacagggcgcattacttcaccagcatctgcgtggagccagaggtgggcaacgtcaccctgcagccagagaggcagtttgtgcagctcggggacgaggcctggctggtggcatgtgcctggcccccgttcccctaccgctacacctgggactttggcaccgaggaagccgcccccacccgtgccaggggccctgaggtgacgttcatctaccgagacccaggctcctatcttgtgacagtcaccgcgtccaacaacatctctgctgccaatgactcagccctggtggaggtgcaggagcccgtgctggtcaccagcatcaaggtcaatggctcccttgggctggagctgcagcagccgtacctgttctctgctgtgggccgtgggcgccccgccagctacctgtgggatctgggggacggtgggtggctcgagggtccggaggtcacccacgcttacaacagcacaggtgacttcaccgttagggtggccggctggaatgaggtgagccgcagcgaggcctggctcaatgtgacggtgaagcggcgcgtgcgggggctcgtcgtcaatgcaagccgcacggtggtgcccctgaatgggagcgtgagcttcagcacgtcgctggaggccggcagtgatgtgcgctattcctgggtgctctgtgaccgctgcacgcccatccctgggggtcctaccatctcttacaccttccgctccgtgggcaccttcaatatcatcgtcacggctgagaacgaggtgggctccgcccaggacagcatcttcgtctatgtcctgcagctcatagaggggctgcaggtggtgggcggtggccgctacttccccaccaaccacacggtacagctgcaggccgtggttagggatggcaccaacgtctcctacagctggactgcctggagggacaggggcccggccctggccggcagcggcaaaggcttctcgctcaccgtgctcgaggccggcacctaccatgtgcagctgcgggccaccaacatgctgggcagcgcctgggccgactgcaccatggacttcgtggagcctgtggggtggctgatggtggccgcctccccgaacccagctgccgtcaacacaagcgtcaccctcagtgccgagctggctggtggcagtggtgtcgtatacacttggtccttggaggaggggctgagctgggagacctccgagccatttaccacccatagcttccccacacccggcctgcacttggtcaccatgacggcagggaacccgctgggctcagccaacgccaccgtggaagtggatgtgcaggtgcctgtgagtggcctcagcatcagggccagcgagcccggaggcagcttcgtggcggccgggtcctctgtgcccttttgggggcagctggccacgggcaccaatgtgagctggtgctgggctgtgcccggcggcagcagcaagcgtggccctcatgtcaccatggtcttcccggatgctggcaccttctccatccggctcaatgcctccaacgcagtcagctgggtctcagccacgtacaacctcacggcggaggagcccatcgtgggcctggtgctgtgggccagcagcaaggtggtggcgcccgggcagctggtccattttcagatcctgctggctgccggctcagctgtcaccttccgcctgcaggtcggcggggccaaccccgaggtgctccccgggccccgtttctcccacagcttcccccgcgtcggagaccacgtggtgagcgtgcggggcaaaaaccacgtgagctgggcccaggcgcaggtgcgcatcgtggtgctggaggccgtgagtgggctgcaggtgcccaactgctgcgagcctggcatcgccacgggcactgagaggaacttcacagcccgcgtgcagcgcggctctcgggtcgcctacgcctggtacttctcgctgcagaaggtccagggcgactcgctggtcatcctgtcgggccgcgacgtcacctacacgcccgtggccgcggggctgttggagatccaggtgcgcgccttcaacgccctgggcagtgagaaccgcacgctggtgctggaggttcaggacgccgtccagtatgtggccctgcagagcggcccctgcttcaccaaccgctcggcgcagtttgaggccgccaccagccccagcccccggcgtgtggcctaccactgggactttggggatgggtcgccagggcaggacacagatgagcccagggccgagcactcctacctgaggcctggggactaccgcgtgcaggtgaacgcctccaacctggtgagcttcttcgtggcgcaggccacggtgaccgtccaggtgctggcctgccgggagccggaggtggacgtggtcctgcccctgcaggtgctgatgcggcgatcacagcgcaactacttggaggcccacgttgacctgcgcgactgcgtcacctaccagactgagtaccgctgggaggtgtatcgcaccgccagctgccagcggccggggcgcccagcgcgtgtggccctgcccggcgtggacgtgagccggcctcggctggtgctgccgcggctggcgctgcctgtggggcactactgctttgtgtttgtcgtgtcatttggggacacgccactgacacagagcatccaggccaatgtgacggtggcccccgagcgcctggtgcccatcattgagggtggctcataccgcgtgtggtcagacacacgggacctggtgctggatgggagcgagtcctacgaccccaacctggaggacggcgaccagacgccgctcagtttccactgggcctgtgtggcttcgacacaggtcagtgcgtggcagggccgtcctccatgcccctcacccgtccacacccatgagcccagagaacacccagcttgccaccagggctggcccgtcctcagtgcctggtgggccccgtcccagcatggggagggggtctcccgcgctgtctcctgggccgggctctgctttaaaactggatggggctctcaggccacgtcgccccttgttctcggcctgcagagggaggctggcgggtgtgcgctgaactttgggccccgcgggagcagcacggtcaccattccacgggagcggctggcggctggcgtggagtacaccttcagcctgaccgtgtggaaggccggccgcaaggaggaggccaccaaccagacggtgggtgccgcccgcccctcggccacttgccttggacagcccagcctccctggtcatctactgttttccgtgttttagtgctggtggaggccgcacgctctcccctctctgtttctgatgcaaattctatgtaacacgacagcctgcttcagctttgcttccttccaaacctgccacagttccacgtacagtcttcaagccacatatgctctagtggcaaaagctacacagtcccctagcaataccaacagtgaggaagagccccttcccaccccagaggtagccactgtccccagcccatgtccctgttgctggatgtggtgggccggttctcaccctcacgctcccctctctggaccggccaggaggcttggtgaccctgagcccgtggtggctgctcctgctgctgtcaggcggggcctgctggtgccccagagtgggcgtctgttccccagtccctgctttcctcagctggcctgattgggggtcttcccagaggggtcgtctgaggggagggtgtgggagcaggttccatcccagctcagcctcctgacccaggccctggctaagggctgcaggagtctgtgagtcaggcctacgtggcagctgcggtcctcacacccacacatacgtctcttctcacacgcatccccccaggggccctcagtgagcattgcctgcctcctgctagggtccagctgggtccagtacaccagaacgcacactccagtgtcctctgccctgtgtatgcccttccgccgtccaagttggaaggtggcaaaccggatgagtatcctgggagggagtgagctcaccggcagtggccaggcccctgggaaacctggagtttgggagcagcatcctccatgggtcccccagtccttccagcaggccaaatagacctgtgttggaggtaaccccactcccacgccaggtgctgatccggagtggccgggtgcccattgtgtccttggagtgtgtgtcctgcaaggcacaggccgtgtacgaagtgagccgcagctcctacgtgtacttggagggccgctgcctcaattgcagcagcggctccaagcgaggggtgagtgttgagcggggtgtgggcgggctggggatgggtcccatggccgaggggacggggcctgcaggcagaagtggggctgacagggcagagggttgcgccccctcaccaccccttctgcctgcagcggtgggctgcacgtacgttcagcaacaagacgctggtgctggatgagaccaccacatccacgggcagtgcaggcatgcgactggtgctgcggcggggcgtgctgcgggacggcgagggatacaccttcacgctcacggtgctgggccgctctggcgaggaggagggctgcgcctccatccgcctgtcccccaaccgcccgccgctggggggctcttgccgcctcttcccactgggcgctgtgcacgccctcaccaccaaggtgcacttcgaatgcacgggtgagtgcaggcctgcgtggggggagcagcgggatcccccgactctgtgacgtcacggagccctcccgtgatgccgtggggaccgtccctcaggctggcatgacgcggaggatgctggcgccccgctggtgtacgccctgctgctgcggcgctgtcgccagggccactgcgaggagttctgtgtctacaagggcagcctctccagctacggagccgtgctgcccccgggtttcaggccacacttcgaggtgggcctggccgtggtggtgcaggaccagctgggagccgctgtggtcgccctcaacaggtgagccaggccgtgggagggcgcccccgagactgccacctgctcaccacccccctctgctcgtaggtctttggccatcaccctcccagagcccaacggcagcgcaacggggctcacagtctggctgcacgggctcaccgctagtgtgctcccagggctgctgcggcaggccgatccccagcacgtcatcgagtactcgttggccctggtcaccgtgctgaacgaggtgagtgcagcctgggaggggacgtcacatctgctgcatgcgtgcttgggaccaagacctgtacccctgcctggagctttgcagagggctcatcccgggccccagagataaatcccagtgaccctgaagcagcaccccgaccttccgctcccagcagccacacccaccgggccctctccggcgtctgctttccacaatgcagcccccgcccaggagggcccatgtgcttaccctgttttgcccatgaagaaacagctcagtgttgtgggtcagtgcccgcatcacacagcgtctagcacgtaactgcaccccgggagtcgtgggcatctgctggcctcctgccggcctcctgcgctgctgacagcttgctgtgccccctgcctgccccagtacgagcgggccctggacgtggcggcagagcccaagcacgagcggcagcaccgagcccagatacgcaagaacatcacggagactctggtgtccctgagggtccacactgtggatgacatccagcagatcgctgctgcgctggcccagtgcatggtaggatggccccacctgctcaccctgccccgcatgcctgccagggcactgggttcagccccccagggcagacgggcagcttggccgaggagctgagcctccagcctgggctccttcctgccatggcgttcctcggtctctgacctgcttcagtagcctcagccgttctgtcctgtgtgaacgcagggtgcctctcgggggacccagggtgtaaagaggggcccagatgtggggagggactaagaagatgctgctctgtgccctccactctcccctcccctcccctcccccttccctcccctagcccctcccctcctcccctcccctagcccttcccctcctcccctcccctagccctttcccttcttcccccccagcccttcccctcctcccctcccctttttctccactcccctctcctctctcccctcctcctccgctctcatgtgaagaggtgccttgtgtggtcggtgggctgcatcacgtggtccccaggtggaggccctgggtcatgcagagccacagaaaatgcttagtgaggaggctgtgggggtccagtcaagtgggctctccagctgcagggctgggggtgggagccaggtgaggacccgtgtagagaggagggcgtgtgcaaggagtggggccaggagcggggctggacactgctggctccacacaggggcccagcagggagctcgtatgccgctcgtgcctgaagcagacgctgcacaagctggaggccatgatgctcatcctgcaggcagagaccaccgcgggcaccgtgacgcccaccgccatcggagacagcatcctcaacatcacaggtgccgcggcccgtgccccatgccacccgcccgccccgtgcggccctttcctctgcctccctcctccccccaaccgcgtcgcctttgccccatcccatcttcgtccccctcccctccccccaattcccatcctcatccccctcccccaattcccattctcctccccctcccccttccctattaccatcccttttctccatctctctccccttttctccatttccccccccgtcctccccgtccttttgtccattcccctcatcttcctcatccccctcatcccccttcccctcccttatcccccttcccctccctttccccctgctcctcttcttctcccttctcttttctctacccttttccttcctttttcctccctctccccatcatccccctcatcttcgtcctcatccccatcaccttccccctcccccctccaccactctctctccagcttcccccttccttctgcctgcacctcgctctctgccccctcaggttccccctttctcccagcccccaccctccggctccccctttttgcctgcccccaccctccctctacctccctgtctctgcactgacctcacgcatgtctgcaggagacctcatccacctggccagctcggacgtgcgggcaccacagccctcagagctgggagccgagtcaccatctcggatggtggcgtcccaggcctacaacctgacctctgccctcatgcgcatcctcatgcgctcccgcgtgctcaacgaggagcccctgacgctggcgggcgaggagatcgtggcccagggcaagcgctcggacccgcggagcctgctgtgctatggcggcgccccagggcctggctgccacttctccatccccgaggctttcagcggggccctggccaacctcagtgacgtggtgcagctcatctttctggtggactccaatccctttccctttggctatatcagcaactacaccgtctccaccaaggtggcctcgatggcattccagacacaggccggcgcccagatccccatcgagcggctggcctcagagcgcgccatcaccgtgaaggtgcccaacaactcggactgggctgcccggggccaccgcagctccgccaactccgccaactccgttgtggtccagccccaggcctccgtcggtgctgtggtcaccctggacagcagcaaccctgcggccgggctgcatctgcagctcaactatacgctgctggacggtgcgtgcagcgggtggggcacacgcggccccctggccttgttcttggggggaaggcgtttctcgtagggcttccatgggtgtctctggtgaaatttgctttctgtttcatgggctgctgggggcctggccagagaggagctgggggccacggagaagcaggtgccagctctggtgcagaggctcctatggcctttcaggcccgtggcagagggtgggctcaggagggccatcgtgggtgtcccccgggtggttgagcttcccggcaggcgtgtgacctgcgcgttctgccccaggccactacctgtctgaggaacctgagccctacctggcagtctacctacactcggagccccggcccaatgagcacaactgctcggctagcaggaggatccgcccagagtcactccagggtgctgaccaccggccctacaccttcttcatttccccggggtgagctctgcgggccagcctggcagggcagggcagggcatcatgggtcagcattgcctgggttactggccccatggggacggcaggcagcgaggggactggaccgggtatgggctctgagactgcgacatccaacctggcggagcctgggctcacgtccgctaccccttccctgcccaggagcagagacccagcggggagttaccatctgaacctctccagccacttccgctggtcggcgctgcaggtgtccgtgggcctgtacacgtccctgtgccagtacttcagcgaggaggacatggtgtggcggacagaggggctgctgcccctggaggagacctcgccccgccaggccgtctgcctcacccgccacctcaccgccttcggcgccagcctcttcgtgcccccaagccatgtccgctttgtgtttcctgtgagtgaccctgtgctcctgggagcctctgcagagtcgaggagggcctgggtgggctcggctctatcctgagaaggcacagcttgcacgtgacctcctgggcccggcggctgtgtcctcacaggagccgacagcggatgtaaactacatcgtcatgctgacatgtgctgtgtgcctggtgacctacatggtcatggccgccatcctgcacaagctggaccagttggatgccagccggggccgcgccatccctttctgtgggcagcggggccgcttcaagtacgagatcctcgtcaagacaggctggggccggggctcaggtgaggggcgcagcggggtggcagggcctcccctgctctcactggctgtgctggttgcaccctctgggagtgagtctcgtcgcaggcgtcagaacaaggcagtttttgcagtgctgtgtgaagggctcgtgtgttcatcctgggaatgacctcgtgagcactcactgtccctgaggactaggacagctcctagctggaagtaggtgccagtcagtcagggtgggcagcccacgttctgcacagtagcgtggccccacaagtgacgtgagcatcgctaccactgtgggagactgtgcatccacccgcgatcctgactgcatagctcgtctctcagacggaggcgccagcaccctccccgtggctgtttcttcagtacctccattttcctttcattggaattgcccttctggcattccctttttgttttcgtttttctttttttagagacggagtctcactctgttgcccaggctggagtgcaatggcatgatcttggctcacagcaacttccagctcccgggtttaagccattccccttaagcgattctcctgagtagctgggagtacaggtgcacaccaccacacccagttaatttttcaccatgtcagccaggcgaactcctgacctcaggtgatccgcctgcctcggcctgccagagtgctgggatgacaggtgtgagccaccacacctggctgtgttcccattttttatctctgtgctgctttcctcttcattgcccagttctttcttttgattacctacttttaaaaactgtcggccgggcgcggtggctcacacctgtaatccgagcactttgggaggccaggcaggcaaatcacggggtcaggagatcgagaccatcctggctaacggtgaaaccctgtctctaataaaaagtacaaaaaaattagcccggcgtagtggcaggcgcctgtagtcccagctccttgggagactgaggcaggagaatggcgtgaacccgggaggcggagcttgcagtgagctgagattgcgccactgcactccagcctgggtgacacagcaagactccatctcaaaaaaaaaagaaaaaaaatactgtcacctgggtctgtcactgggagaggaggtgacacagcttcacgctttgcagtctgtgcatgaactgagggacgggtgtgtggtgcgggtcaccggttgtggcatgactgaggcgtggacaggtgtgcagtgcgggtcactggttgtggtgtggactgaggcgtgtgcagccatgtttgcatgtcacaagttacagttctttccatgtaacttaatcatgtccttgaggtcctgctgttaattggacaaattgcagtaaccgcagctccttgtgtatggcagagccgtgcaaagccgggactgcctgtgtggctccttgagtgcgcacaggccaaagctgagatgacttgcctgggatgccacacgtgttgggcagcagaccgagcctcccacccctccctcttgcctcccaggtaccacggcccacgtgggcatcatgctgtatggggtggacagccggagcggccaccggcacctggacggcgacagagccttccaccgcaacagcctggacatcttccggatcgccaccccgcacagcctgggtagcgtgtggaagatccgagtgtggcacgacaacaaaggtttgtgcggaccctgccaagctctgcccctctgcccccgcattggggcgccctgcgagcctgacctccctcctgcgcctctgcagggctcagccctgcctggttcctgcagcacgtcatcgtcagggacctgcagacggcacgcagcgccttcttcctggtcaatgactggctttcggtggagacggaggccaacgggggcctggtggagaaggaggtgctggccgcgagtaaggcctcgttccatgttcccactccgtgggaggttgggcagggtggtcctgccccgtggcctcctgcagtgcggccctccctgccttctaggcgacgcagcccttttgcgcttccggcgcctgctggtggctgagctgcagcgtggcttctttgacaagcacatctggctctccatatgggaccggccgcctcgtagccgtttcactcgcatccagagggccacctgctgcgttctcctcatctgcctcttcctgggcgccaacgccgtgtggtacggggctgttggcgactctgcctacaggtgggtgccgtaggggtcggggcagcctcttcctgcccagcccttcctgcccctcagcctcacctgtgtggcctcctctcctccacacagcacggggcatgtgtccaggctgagcccgctgagcgtcgacacagtcgctgttggcctggtgtccagcgtggttgtctatcccgtctacctggccatcctttttctcttccggatgtcccggagcaaggtgggctggggctggggacccgggagtactgggaatggagcctgggcctcggcaccatgcctagggccgccactttccagtgctgcagccagagggaaaggcgtccaccaaaggctgctcgggaagggtcaacacacttgagcagccttagctagactgaccagggagaaagagagaagactcagaagccagaatggtgaaagaacgagggcactttgctaagcagacgccacggacgactgcacagcagcacgccagataactcagaagaagcaagcacgcggctgtgcacgcttccgaaatgcactccagaagaaaatctcagtacatctataggaagtgaagaggctgagttagtcccttagaaacgtcccagtggccgggccgggtgtggtggctcacgcctgtaatcccaacacttcaggtggccgaggtgggcggatctgagtccaggagtttgagaccagcctgggcaacatagcaagaccccatctatataaaacattaaaaagggccaggcgcggtggctcacgcctgtaatcccagcactttgggaggccgaggcgggcagatcacttgaggtcaggagttcgagaccagcctggccaacacaatgaaaccccgactctactacaaatacaaaaacttagctgggcatggtggcgggcgcctgtagtcccagctactcgagaggctgaggcaggagaatggcatgaacccaggaggcggagcttgcagtgagccgagattgcgccactgcactccatcctgggcaacggagcaagactccatctccaaaaaaaaaaaaaaaaaatcccacaaagaaaagctcaggctcagagccttcacgatagaatttttctaagcagttaaggaagaattaacaccaatccttcacagactctttccaagaatacagcaggtgggaacgcttcccattcatacggaaacgggaggccgcaccccttaggaatgcacacgtggggtcctcaagaggttacatgcaaactaaccccagcagcacacagagaaggcgcataagccgcgaccaggaggggttgctcccgagtccgtggcaggaaccagaggccacatgtggctgctcgtatttaagttaattaaaatggaacgatggccgggtgtggtggctcacacctgtaatcccagcactttgggaggcggaggcgggcagatcacttgaggtcaggagttccaagaccagcctggccaacacagtgaaaccccgtctctactaaaaatacaaaaaattagctgggcatggtggcaggcacctgtaatcccagctactcaggaggctgagccaggacaatcgcctgaacgcgggaggtggaggttgcagtgagctgagattgcgccattgcactccagcctgggtgacagcgagactccatctaaaaaagaaaatatgaaatttaaaactctgttccttagctgcaccagtctgctgtcaagtgttcagtggcacacgtcgcgaggggctgccatcacggacggtgcagatgtcccatatatccagcattctaggacattctgtcagatggcaccgggctctgtcctgtctgctgaggaggtggcttctcatccctgtcctgagcaggtctgagctgccgcccgctgaccactgccctcgtcctgcaggtggctgggagcccgagccccacacctgccgggcagcaggtgctggacatcgacagctgcctggactcgtccgtgctggacagctccttcctcacgttctcaggcctccacgctgaggtgaggactctactgggggtcctgggctgggctgggggtcctgccgccttggcgcagcttggactcaagacactgtgcacctctcagcaggcctttgttggacagatgaagagtgacttgtttctggatgattctaagaggtgggttccctagagaaacctcgagccctggtgcaggtcactgtgtctggggtgccgggggtgtgcgggctgcgtgtccttgctgggtgtctgtggctccatgtggtcacaccacccgggagcaggtttgctcggaagcccagggtgtccgtgcgtgactggacgggggtgggctgtgtgtgtgacacatcccctggtaccttgctgacccgcgccacctgcagtctggtgtgctggccctccggcgagggaacgctcagttggccggacctgctcagtgacccgtccattgtgggtagcaatctgcggcagctggcacggggccaggcgggccatgggctgggcccagaggaggacggcttctccctggccagcccctactcgcctgccaaatccttctcagcatcaggtgagctggggtgagaggagggggctctgaagctcacccttgcagctgggcccaccctatgcctcctgtacctctagatgaagacctgatccagcaggtccttgccgagggggtcagcagcccagcccctacccaagacacccacatggaaacggacctgctcagcagcctgtgagtgtccggctctcgggggaggggggattgccagaggaggggccgggactcaggccaggcagccgtggttcccgcctggggtagggtggggtggggtgccagggcagggctgtggctgcaccacttcacttctctgaacctctgttgtctgtggaaagagcctcatgggatccccagggccccagaaccttccctctagggagggagcaggctcatggggctttgtaggagcagaaaggctcctgtgtgaggctggccggggccacgtttttatcttggtctcagagcagtgagaaattatgggcgggtttttaaataccccatttttggccgggcgcggtggctcacacgtgtaatcccagcactttgggaggccgaggtgggcagatgacctgaggtcagcagttcgagaccagcctggccaacatggcgaaaccccgtctctactaaaaatacaaaaaattagccgggcatgctggcaggcgcctgtagtcccagttactcgggagactgaggtaggagaatcgattgaacctggtaggtgaaggttgtagtgagccgagatcgcgccactgcactccagcctgggcaacaagagcgaaactccgtctcaaaaacaaaaaaattcctcaatttcttggttgttttgtaacttatcaacaaatggtcatatagaggttaccttgtatgtagtcacgcacatagtcacgcacatggcagccggcggcggagcgcacccacggcgtgttcccacgcgtgtgaccccgggctctgccatgccctcctatgctcaggtgtgctgaggtccacacggccctgccgttgcactgcagctgcctgcaggattcagtgcagtggcatgcagtgcaggtgcggtgccccggagccacaggccacaccacagggcctgcatgcacaggggctgcggtgtctgggtttgggtaactacgccctgtgacatttgcacagcaacagaattacctaatgacgcatttctcagaacacatccctggcactaagtggtgcgtgactgctgcttttgcatccacatctagtttgatttgtgtgttattcctttgagtgcttctcattgttaagcaaccaagaactaaagaggtatgaactgcccctggactcaaacaaaaaggaaaacttcctgatttacaaaaggcagataaccatcacatgagggcatctttatgaataaattgctggttggttttaaaaatacagagtatggggaaatccaggggtagtcactacatgctgaccagccccaggtatctccggcccaaagctctgtgaaatccagattcagtgcttccgcggggatttctgacggcagctcagactccgcatccacacagagcgcgtggccctcaccctcccggcttcctcaacccttggccgtcccttgctcggacagtgcttcgggctgaccaggtcggaggcttgggtttgtcctggacccctctgcgtccttcctcactgcagcctccagcgcgtcccgtggctcctttcccaacgcagagcacggccttccctgcgcctgagcctgcaccctccgtcctggcggcgcctctgccctggcattccctgccactccatgcctccctattggccattctccgtctctgccagcgagagcctgctccctgagtcagaccctgagtcatttgtgttgctataaaggaatagttgaggctgggttattttttatttttatttatttttttgagatggagtctctgttgcccagactggagtgcagtcgcatgatctcggctcactgcaaagtctgcctcccacgttcaagcagttatctgcctcagcctcccaagtagctaagattacaggcgcccgccgccacagccggctaattttttgtgtgtgtgttttagtagagaggaggtttcaccatcttagccaggctggtcttgaactcctgacctcgtgatccacccatctcagcctcccaaaatgctgagattacaggcgtgagccaccacgcctgaccaagttgaggctaggtcattttttaattttttgtaaagacagggtctcactgtctccaactcctgagctcaagtgatcctcctgcctcagcctcctgaagtgctgggattacaggcttgagacactgcgcccagccaagagtgtcttttatcctccgagagacagcaaaacaggaagcattcagtgcagtgtgaccctgggtcaggccgttctttcggtgatgggctgacgagggcgcaggtacgggagagcgtcctgagagcccgggactcggcgtctcgcagttggtctcgtcctccccctcaacgtgtcttcgctgcctctgtacctcttctctagcagctctgggaccgggcatatcagcatggtggcccgatgcagtggcacagcctcggtggtcactggctcctggagacacaagcagatctctggcctcagggagccctacacactgttgggatttgaaaggcattcatatgtttccttgtccagaagttaattttaggccataaacctgcatgggacagacacactggcgtctctagattgtagagatgcttgttggatggttgagacccaatcatagtttgcagggttgaaggggggctcattgcaccctgagagactgtgcactgctgtaagggcagctggtcaggctgtgggcgatgggtttatcagcagcaagcgggcgggagagggacgcaggcggacgcctgacttcggtgcctggagtggctcttggttccctggctcccagcaccactcccactctcgtttggggtagggtcttccggctttttgtcggggggaccctgtgacccaagaggctcaagaaactgcccgcccaggttaacatgggcttggctgcaactgcctcctggaggccgggatgaattcacagcctaccatgtccctcaggtccagcactcctggggagaagacagagacgctggcgctgcagaggctgggggagctggggccacccagcccaggcctgaactgggaacagccccaggcagcgaggctgtccaggacaggtgtgcttgcgtagccccgggatgcccctagcccctccctgtgagctgcctctcacaggtctgtctctgcttccccaggactggtggagggtctgcggaagcgcctgctgccggcctggtgtgcctccctggcccacgggctcagcctgctcctggtggctgtggctgtggctgtctcagggtgggtgggtgcgagcttccccccgggcgtgagtgttgcgtggctcctgtccagcagcgccagcttcctggcctcattcctcggctgggagccactgaaggtgagggggctgccaggggtaggctacaggcctccatcacgggggacccctctgaagccaccccctccccaggtcttgctggaagccctgtacttctcactggtggccaagcggctgcacccggatgaagatgacaccctggtagagagcccggctgtgacgcctgtgagcgcacgtgtgccccgcgtacggccaccccacggctttgcactcttcctggccaaggaagaagcccgcaaggtcaagaggctacatggcatgctgcgggtgagcctgggtgcggcctgtgcccctgccacctccgtctcttgtctcccacctcccacccatgcacgcaggacactcctgtccccctttcctcacctcagaaggcccttaggggttcaatgctctgcagcctttgcccggtctccctcctaccccacgccccccacttgctgccccagtccctgccagggcccagctccaatgcccactcctgcctggccctgaaggcccctaagcaccactgcagtggcctgtgtgtctgcccccaggtggggttccgggcagggtgtgtgctgccattaccctggccaggtagagtcttggggcgccccctgccagctcaccttcctgcagccacacctgccgcagccatggctccagccgttgccaaagccctgctgtcactgtgggctggggccaggctgaccacagggcccccccgtccaccagagcctcctggtgtacatgctttttctgctggtgaccctgctggccagctatggggatgcctcatgccatgggcacgcctaccgtctgcaaagcgccatcaagcaggagctgcacagccgggccttcctggccatcacgcggtacgggcatccggtgcactggtctgtcttctgggctttagttttgcctttagtccagccagaccctaggggacatgtggacatgtgtagatacctttgtggctgctagaactggaggtaggtgctgctggcatcagtaggcagaggggagggacacaggtccgtgtcttgcagtgcacaggacgggcccatgacagacaactgtctgccccagaacatccccaggataaggctgagaagcccaggtctagccgtggccagcagggcagtgggagccatgttccctgggtctctggtggccgctcactcgaggcgggcatggggcagtaggggctggagcgtgtgactgatgctgtggcaggtctgaggagctctggccatggatggcccacgtgctgctgccctacgtccacgggaaccagtccagcccagagctggggcccccacggctgcggcaggtgcggctgcaggaaggtgagctggcagggcgtgccccaagacttaaatcgttcctcttgttgagagagcagcctttagcggagctctggcatcagccctgctccctagctgtgtgacctttgccctcttaacaccgccgtttccttctctgtatatgagagatggtaacgttgtctaattgatggctgctgggagggttccctggggtggcgccgaaccagagctcaggcgagctggccagcaggaaacactcctgttgggttttgatgaggccctggccccggcctggggctctgtgtgtttcagcactctacccagaccctcccggccccagggtccacacgtgctcggccgcaggaggcttcagcaccagcgattacgacgttggctgggagagtcctcacaatggctcggggacgtgggcctattcagcgccggatctgctggggtgagcagagcgagggccccgggcgtctacgccaaggacaagggagtagttctccaggagtgccgcggcctcctgaccagcctggctccggggtgccggaagggctggggtgcggcacccacgccacccctctccggcagggcatggtcctggggctcctgtgccgtgtatgacagcgggggctacgtgcaggagctgggcctgagcctggaggagagccgcgaccggctgcgcttcctgcagctgcacaactggctggacaacaggtgggagctccctcccctgccctctccggggtggccgcagtcaccagccaggagcccaccctcactcctccggcccccgctggcctaggcggcttccacagcccctcagccacgcctgcactgcgcggtccccgcagctcccgccctgccacccgctcctactgacccgcaccctctgcgcaggagccgcgctgtgttcctggagctcacgcgctacagcccggccgtggggctgcacgccgccgtcacgctgcgcctcgagttcccggcggccggccgcgccctggccgccctcagcgtccgcccctttgcgctgcgccgcctcagcgcgggcctctcgctgcctctgctcacctcggtacgcccgtccccggccagaccccgcgcctcccaccggcagcgtcccgccccctcgcggggccccgccccggcagcgtctcacccctcgcagcgccccgccccctcgcagcgtcccgccccctcgcagggccccgccccggcagcgtcccgccccctcgtagggccccgccccggcagcgtcccgccccctcgcagggccccgccccggcagcgtccctcccgccctcctgaccgcgccccccacaggtgtgcctgctgctgttcgccgtgcacttcgccgtggccgaggcccgtacttggcacagggaagggcgctggcgcgtgctgcggctcggagcctgggcgcggtggctgctggtggcgctgacggcggccacggcactggtacgcctcgcccagctgggtgccgctgaccgccagtggacccgtttcgtgcgcggccgcccgcgccgcttcactagcttcgaccaggtggcgcagctgagctccgcagcccgtggcctggcggcctcgctgctcttcctgcttttggtcaaggtgagggctgggccggtgggcgcggggctgggcgcacaccccagggctgcaagcagacagatttctcgtccgcaggctgcccagcagctacgcttcgtgcgccagtggtccgtctttggcaagacattatgccgagctctgccagagctcctgggggtcaccttgggcctggtggtgctcggggtagcctacgcccagctggccatcctggtaggtgactgcgcggccggggagggcgtcttagctcagctcagctcagctgtacgccctcactggtgtcgccttccccgcagctcgtgtcttcctgtgtggactccctctggagcgtggcccaggccctgttggtgctgtgccctgggactgggctctctaccctgtgtcctgccgagtcctggcacctgtcacccctgctgtgtgtggggctctgggcactgcggctgtggggcgccctacggctgggggctgttattctccgctggcgctaccacgccttgcgtggagagctgtaccggccggcctgggagccccaggactacgagatggtggagttgttcctgcgcaggctgcgcctctggatgggcctcagcaaggtcaaggaggtgggtacggcccagtgggggggagagggacacgccctgggctctgcccagggtgcagccggactgactgagcccctgtgccgcccccagttccgccacaaagtccgctttgaagggatggagccgctgccctctcgctcctccaggggctccaaggtatccccggatgtgcccccacccagcgctggctccgatgcctcgcacccctccacctcctccagccagctggatgggctgagcgtgagcctgggccggctggggacaaggtgtgagcctgagccctcccgcctccaagccgtgttcgaggccctgctcacccagtttgaccgactcaaccaggccacagaggacgtctaccagctggagcagcagctgcacagcctgcaaggccgcaggagcagccgggcgcccgccggatcttcccgtggcccatccccgggcctgcggccagcactgcccagccgccttgcccgggccagtcggggtgtggacctggccactggccccagcaggacaccccttcgggccaagaacaaggtccaccccagcagcacttagtcctccttcctggcgggggtgggccgtggagtcggagtggacaccgctcagtattactttctgccgctgtcaaggccgagggccaggcagaatggctgcacgtaggttccccagagagcaggcaggggcatctgtctgtctgtgggcttcagcactttaaagaggctgtgtggccaaccaggacccagggtcccctccccagctcccttgggaaggacacagcagtattggacggtttctagcctctgagatgctaatttatttccccgagtcctcaggtacagcgggctgtgcccggccccaccccctgggcagatgtcccccactgctaaggctgctggcttcagggagggttagcctgcaccgccgccaccctgcccctaagttattacctctccagttcctaccgtactccctgcaccgtctcactgtgtgtctcgtgtcagtaatttatatggtgttaaaatgtgtatatttttgtatgtcactattttcactagggctgaggggcctgcgcccagagctggcctcccccaacacctgctgcgcttggtaggtgtggtggcgttatggcagcccggctgctgcttggatgcgagcttggccttgggccggtgctgggggcacagctgtctgccaggcactctcatcaccccagaggccttgtcatcctcccttgccccaggccaggtagcaagagagcagcgcccaggcctgctggcatcaggtctgggcaagtagcaggactaggcatgtcagaggaccccagggtggttagaggaaaagactcctcctgggggctggctcccagggtggaggaaggtgactgtgtgtgtgtgtgtgtgcgcgcgcgcacgcgcgagtgtgctgtatggcccaggcagcctcaaggccctcggagctggctgtgcctgcttctgtgtaccacttctgtgggcatggccgcttctagagcctcgacacccccccaacccccgcaccaagcagacaaagtcaataaaagagctgtctgactgcaatctgtgcctctatgtctgtgcactggggtcaggactttatttatttcactgacaggcaataccgtccaaggccagtgcaggagggagggccccggcctcacacaaactcggtgaagtcctccaccgaggagatgaggcgcttccgctggcccacctcatagccaggtgtgggctcggctggagtctgtgcaggggctttgctatgggacggagggtgcaccagaggtaggctggggttggagtaggcggcttcctcgcagatctgaaggcagaggcggcttgggcagtaagtctgggaggcgtggcaaccgctctgcccacacacccgccccacagcttgggcagccagcacaccccgctgagggagccccatattccctacccgctggcggagccgcttgatgtggcggagccgggcaatccacttggaggggtagatatcggtggggttggagcggctatgatgcacctgtgaggccatctggggacgtaggcagggggtgagctcactatcaggtggcacctgggcctgtcccaccagctcacgcctggacccacccccactcacatttgcgtgcagggccatctggcgggccacgaagggcaggttgcggtcagacacgatcttggccacgctggtgtccacaaggccctccatgtctggggagacttggtggtcacgccaggcccagggctcttggcgccacactgcagggccccacccggccctacctttcctgcactgcagggccccacccggccctacctttcctgcactgcagggacaccaggttgcactcgtagtccagcggggtgacgatcacgtggacaaagttgaactggccctgcccggacaagagaaagggtcatccccgcacacagcgtgtgctgaaggctgatctcggctactgcctggttgcactgctagacacctgtcagctccatgggcagcatctgcccctgaactttcccctctggcagcggggctgtgtttgtctggcctccccca

SEQ ID NO: 106 - DNA, 14135 bp, Homo sapiens
gcactgcagcgccagcgtccgagcgggcggccgagctcccggagcggcctggccccgagccccgagcgggcgtcgctcagcagcaggtcgcggccgcagccccatccagccccgcgcccgccatgccgtccgcgggccccgcctgagctgcggcctccgcgcgcgggcgggcctggggacggcggggccatgcgcgcgctgccctaacgatgccgcccgccgcgcccgcccgcctggcgctggccctgggcctgggcctgtggctcggggcgctggcggggggccccgggcgcggctgcgggccctgcgagcccccctgcctctgcggcccagcgcccggcgccgcctgccgcgtcaactgctcgggccgcgggctgcggacgctcggtcccgcgctgcgcatccccgcggacgccacagcgctagacgtctcccacaacctgctccgggcgctggacgttgggctcctggcgaacctctcggcgctggcagagctggatataagcaacaacaagatttctacgttagaagaaggaatatttgctaatttatttaatttaagtgaaataaacctgagtgggaacccgtttgagtgtgactgtggcctggcgtggctgccgcgatgggcggaggagcagcaggtgcgggtggtgcagcccgaggcagccacgtgtgctgggcctggctccctggctggccagcctctgcttggcatccccttgctggacagtggctgtggtgaggagtatgtcgcctgcctccctgacaacagctcaggcaccgtggcagcagtgtccttttcagctgcccacgaaggcctgcttcagccagaggcctgcagcgccttctgcttctccaccggccagggcctcgcagccctctcggagcagggctggtgcctgtgtggggcggcccagccctccagtgcctcctttgcctgcctgtccctctgctccggccccccgccacctcctgcccccacctgtaggggccccaccctcctccagcacgtcttccctgcctccccaggggccaccctggtggggccccacggacctctggcctctggccagctagcagccttccacatcgctgccccgctccctgtcactgccacacgctgggacttcggagacggctccgccgaggtggatgccgctgggccggctgcctcgcatcgctatgtgctgcctgggcgctatcacgtgacggccgtgctggccctgggggccggctcagccctgctggggacagacgtgcaggtggaagcggcacctgccgccctggagctcgtgtgcccgtcctcggtgcagagtgacgagagccttgacctcagcatccagaaccgcggtggttcaggcctggaggccgcctacagcatcgtggccctgggcgaggagccggcccgagcggtgcacccgctctgcccctcggacacggagatcttccctggcaacgggcactgctaccgcctggtggtggagaaggcggcctggctgcaggcgcaggagcagtgtcaggcctgggccggggccgccctggcaatggtggacagtcccgccgtgcagcgcttcctggtctcccgggtcaccaggagcctagacgtgtggatcggcttctcgactgtgcagggggtggaggtgggcccagcgccgcagggcgaggccttcagcctggagagctgccagaactggctgcccggggagccacacccagccacagccgagcactgcgtccggctcgggcccaccgggtggtgtaacaccgacctgtgctcagcgccgcacagctacgtctgcgagctgcagcccggaggcccagtgcaggatgccgagaacctcctcgtgggagcgcccagtggggacctgcagggacccctgacgcctctggcacagcaggacggcctctcagccccgcacgagcccgtggaggtcatggtattcccgggcctgcgtctgagccgtgaagccttcctcaccacggccgaatttgggacccaggagctccggcggcccgcccagctgcggctgcaggtgtaccggctcctcagcacagcagggaccccggagaacggcagcgagcctgagagcaggtccccggacaacaggacccagctggcccccgcgtgcatgccagggggacgctggtgccctggagccaacatctgcttgccgctggacgcctcctgccacccccaggcctgcgccaatggctgcacgtcagggccagggctacccggggccccctatgcgctatggagagagttcctcttctccgttcccgcggggccccccgcgcagtactcggtcaccctccacggccaggatgtcctcatgctccctggtgacctcgttggcttgcagcacgacgctggccctggcgccctcctgcactgctcgccggctcccggccaccctggtccccaggccccgtacctctccgccaacgcctcgtcatggctgccccacttgccagcccagctggagggcacttgggcctgccctgcctgtgccctgcggctgcttgcagccacggaacagctcaccgtgctgctgggcttgaggcccaaccctggactgcggctgcctgggcgctatgaggtccgggcagaggtgggcaatggcgtgtccaggcacaacctctcctgcagctttgacgtggtctccccagtggctgggctgcgggtcatctaccctgccccccgcgacggccgcctctacgtgcccaccaacggctcagccttggtgctccaggtggactctggtgccaacgccacggccacggctcgctggcctgggggcagtgtcagcgcccgctttgagaatgtctgccctgccctggtggccaccttcgtgcccggctgcccctgggagaccaacgataccctgttctcagtggtagcactgccgtggctcagtgagggggagcacgtggtggacgtggtggtggaaaacagcgccagccgggccaacctcagcctgcgggtgacggcggaggagcccatctgtggcctccgcgccacgcccagccccgaggcccgtgtactgcagggagtcctagtgaggtacagccccgtggtggaggccggctcggacatggtcttccggtggaccatcaacgacaagcagtccctgaccttccagaacgtggtcttcaatgtcatttatcagagcgcggcggtcttcaagctctcactgacggcctccaaccacgtgagcaacgtcaccgtgaactacaacgtaaccgtggagcggatgaacaggatgcagggtctgcaggtctccacagtgccggccgtgctgtcccccaatgccacgctagcactgacggcgggcgtgctggtggactcggccgtggaggtggccttcctgtggacctttggggatggggagcaggccctccaccagttccagcctccgtacaacgagtccttcccggttccagacccctcggtggcccaggtgctggtggagcacaatgtcatgcacacctacgctgccccaggtgagtacctcctgaccgtgctggcatctaatgccttcgagaacctgacgcagcaggtgcctgtgagcgtgcgcgcctccctgccctccgtggctgtgggtgtgagtgacggcgtcctggtggccggccggcccgtcaccttctacccgcacccgctgccctcgcctgggggtgttctttacacgtgggacttcggggacggctcccctgtcctgacccagagccagccggctgccaaccacacctatgcctcgaggggcacctaccacgtgcgcctggaggtcaacaacacggtgagcggtgcggcggcccaggcggatgtgcgcgtctttgaggagctccgcggactcagcgtggacatgagcctggccgtggagcagggcgcccccgtggtggtcagcgccgcggtgcagacgggcgacaacatcacgtggaccttcgacatgggggacggcaccgtgctgtcgggcccggaggcaacagtggagcatgtgtacctgcgggcacagaactgcacagtgaccgtgggtgcggccagccccgccggccacctggcccggagcctgcacgtgctggtcttcgtcctggaggtgctgcgcgttgaacccgccgcctgcatccccacgcagcctgacgcgcggctcacggcctacgtcaccgggaacccggcccactacctcttcgactggaccttcggggatggctcctccaacacgaccgtgcgggggtgcccgacggtgacacacaacttcacgcggagcggcacgttccccctggcgctggtgctgtccagccgcgtgaacagggcgcattacttcaccagcatctgcgtggagccagaggtgggcaacgtcaccctgcagccagagaggcagtttgtgcagctcggggacgaggcctggctggtggcatgtgcctggcccccgttcccctaccgctacacctgggactttggcaccgaggaagccgcccccacccgtgccaggggccctgaggtgacgttcatctaccgagacccaggctcctatcttgtgacagtcaccgcgtccaacaacatctctgctgccaatgactcagccctggtggaggtgcaggagcccgtgctggtcaccagcatcaaggtcaatggctcccttgggctggagctgcagcagccgtacctgttctctgctgtgggccgtgggcgccccgccagctacctgtgggatctgggggacggtgggtggctcgagggtccggaggtcacccacgcttacaacagcacaggtgacttcaccgttagggtggccggctggaatgaggtgagccgcagcgaggcctggctcaatgtgacggtgaagcggcgcgtgcgggggctcgtcgtcaatgcaagccgcacggtggtgcccctgaatgggagcgtgagcttcagcacgtcgctggaggccggcagtgatgtgcgctattcctgggtgctctgtgaccgctgcacgcccatccctgggggtcctaccatctcttacaccttccgctccgtgggcaccttcaatatcatcgtcacggctgagaacgaggtgggctccgcccaggacagcatcttcgtctatgtcctgcagctcatagaggggctgcaggtggtgggcggtggccgctacttccccaccaaccacacggtacagctgcaggccgtggttagggatggcaccaacgtctcctacagctggactgcctggagggacaggggcccggccctggccggcagcggcaaaggcttctcgctcaccgtgctcgaggccggcacctaccatgtgcagctgcgggccaccaacatgctgggcagcgcctgggccgactgcaccatggacttcgtggagcctgtggggtggctgatggtggccgcctccccgaacccagctgccgtcaacacaagcgtcaccctcagtgccgagctggctggtggcagtggtgtcgtatacacttggtccttggaggaggggctgagctgggagacctccgagccatttaccacccatagcttccccacacccggcctgcacttggtcaccatgacggcagggaacccgctgggctcagccaacgccaccgtggaagtggatgtgcaggtgcctgtgagtggcctcagcatcagggccagcgagcccggaggcagcttcgtggcggccgggtcctctgtgcccttttgggggcagctggccacgggcaccaatgtgagctggtgctgggctgtgcccggcggcagcagcaagcgtggccctcatgtcaccatggtcttcccggatgctggcaccttctccatccggctcaatgcctccaacgcagtcagctgggtctcagccacgtacaacctcacggcggaggagcccatcgtgggcctggtgctgtgggccagcagcaaggtggtggcgcccgggcagctggtccattttcagatcctgctggctgccggctcagctgtcaccttccgcctgcaggtcggcggggccaaccccgaggtgctccccgggccccgtttctcccacagcttcccccgcgtcggagaccacgtggtgagcgtgcggggcaaaaaccacgtgagctgggcccaggcgcaggtgcgcatcgtggtgctggaggccgtgagtgggctgcaggtgcccaactgctgcgagcctggcatcgccacgggcactgagaggaacttcacagcccgcgtgcagcgcggctctcgggtcgcctacgcctggtacttctcgctgcagaaggtccagggcgactcgctggtcatcctgtcgggccgcgacgtcacctacacgcccgtggccgcggggctgttggagatccaggtgcgcgccttcaacgccctgggcagtgagaaccgcacgctggtgctggaggttcaggacgccgtccagtatgtggccctgcagagcggcccctgcttcaccaaccgctcggcgcagtttgaggccgccaccagccccagcccccggcgtgtggcctaccactgggactttggggatgggtcgccagggcaggacacagatgagcccagggccgagcactcctacctgaggcctggggactaccgcgtgcaggtgaacgcctccaacctggtgagcttcttcgtggcgcaggccacggtgaccgtccaggtgctggcctgccgggagccggaggtggacgtggtcctgcccctgcaggtgctgatgcggcgatcacagcgcaactacttggaggcccacgttgacctgcgcgactgcgtcacctaccagactgagtaccgctgggaggtgtatcgcaccgccagctgccagcggccggggcgcccagcgcgtgtggccctgcccggcgtggacgtgagccggcctcggctggtgctgccgcggctggcgctgcctgtggggcactactgctttgtgtttgtcgtgtcatttggggacacgccactgacacagagcatccaggccaatgtgacggtggcccccgagcgcctggtgcccatcattgagggtggctcataccgcgtgtggtcagacacacgggacctggtgctggatgggagcgagtcctacgaccccaacctggaggacggcgaccagacgccgctcagtttccactgggcctgtgtggcttcgacacagagggaggctggcgggtgtgcgctgaactttgggccccgcgggagcagcacggtcaccattccacgggagcggctggcggctggcgtggagtacaccttcagcctgaccgtgtggaaggccggccgcaaggaggaggccaccaaccagacggtgctgatccggagtggccgggtgcccattgtgtccttggagtgtgtgtcctgcaaggcacaggccgtgtacgaagtgagccgcagctcctacgtgtacttggagggccgctgcctcaattgcagcagcggctccaagcgagggcggtgggctgcacgtacgttcagcaacaagacgctggtgctggatgagaccaccacatccacgggcagtgcaggcatgcgactggtgctgcggcggggcgtgctgcgggacggcgagggatacaccttcacgctcacggtgctgggccgctctggcgaggaggagggctgcgcctccatccgcctgtcccccaaccgcccgccgctggggggctcttgccgcctcttcccactgggcgctgtgcacgccctcaccaccaaggtgcacttcgaatgcacgggctggcatgacgcggaggatgctggcgccccgctggtgtacgccctgctgctgcggcgctgtcgccagggccactgcgaggagttctgtgtctacaagggcagcctctccagctacggagccgtgctgcccccgggtttcaggccacacttcgaggtgggcctggccgtggtggtgcaggaccagctgggagccgctgtggtcgccctcaacaggtctttggccatcaccctcccagagcccaacggcagcgcaacggggctcacagtctggctgcacgggctcaccgctagtgtgctcccagggctgctgcggcaggccgatccccagcacgtcatcgagtactcgttggccctggtcaccgtgctgaacgagtacgagcgggccctggacgtggcggcagagcccaagcacgagcggcagcaccgagcccagatacgcaagaacatcacggagactctggtgtccctgagggtccacactgtggatgacatccagcagatcgctgctgcgctggcccagtgcatggggcccagcagggagctcgtatgccgctcgtgcctgaagcagacgctgcacaagctggaggccatgatgctcatcctgcaggcagagaccaccgcgggcaccgtgacgcccaccgccatcggagacagcatcctcaacatcacaggagacctcatccacctggccagctcggacgtgcgggcaccacagccctcagagctgggagccgagtcaccatctcggatggtggcgtcccaggcctacaacctgacctctgccctcatgcgcatcctcatgcgctcccgcgtgctcaacgaggagcccctgacgctggcgggcgaggagatcgtggcccagggcaagcgctcggacccgcggagcctgctgtgctatggcggcgccccagggcctggctgccacttctccatccccgaggctttcagcggggccctggccaacctcagtgacgtggtgcagctcatctttctggtggactccaatccctttccctttggctatatcagcaactacaccgtctccaccaaggtggcctcgatggcattccagacacaggccggcgcccagatccccatcgagcggctggcctcagagcgcgccatcaccgtgaaggtgcccaacaactcggactgggctgcccggggccaccgcagctccgccaactccgccaactccgttgtggtccagccccaggcctccgtcggtgctgtggtcaccctggacagcagcaaccctgcggccgggctgcatctgcagctcaactatacgctgctggacggccactacctgtctgaggaacctgagccctacctggcagtctacctacactcggagccccggcccaatgagcacaactgctcggctagcaggaggatccgcccagagtcactccagggtgctgaccaccggccctacaccttcttcatttccccggggagcagagacccagcggggagttaccatctgaacctctccagccacttccgctggtcggcgctgcaggtgtccgtgggcctgtacacgtccctgtgccagtacttcagcgaggaggacatggtgtggcggacagaggggctgctgcccctggaggagacctcgccccgccaggccgtctgcctcacccgccacctcaccgccttcggcgccagcctcttcgtgcccccaagccatgtccgctttgtgtttcctgagccgacagcggatgtaaactacatcgtcatgctgacatgtgctgtgtgcctggtgacctacatggtcatggccgccatcctgcacaagctggaccagttggatgccagccggggccgcgccatccctttctgtgggcagcggggccgcttcaagtacgagatcctcgtcaagacaggctggggccggggctcaggtaccacggcccacgtgggcatcatgctgtatggggtggacagccggagcggccaccggcacctggacggcgacagagccttccaccgcaacagcctggacatcttccggatcgccaccccgcacagcctgggtagcgtgtggaagatccgagtgtggcacgacaacaaagggctcagccctgcctggttcctgcagcacgtcatcgtcagggacctgcagacggcacgcagcgccttcttcctggtcaatgactggctttcggtggagacggaggccaacgggggcctggtggagaaggaggtgctggccgcgagcgacgcagcccttttgcgcttccggcgcctgctggtggctgagctgcagcgtggcttctttgacaagcacatctggctctccatatgggaccggccgcctcgtagccgtttcactcgcatccagagggccacctgctgcgttctcctcatctgcctcttcctgggcgccaacgccgtgtggtacggggctgttggcgactctgcctacagcacggggcatgtgtccaggctgagcccgctgagcgtcgacacagtcgctgttggcctggtgtccagcgtggttgtctatcccgtctacctggccatcctttttctcttccggatgtcccggagcaaggtggctgggagcccgagccccacacctgccgggcagcaggtgctggacatcgacagctgcctggactcgtccgtgctggacagctccttcctcacgttctcaggcctccacgctgaggcctttgttggacagatgaagagtgacttgtttctggatgattctaagagtctggtgtgctggccctccggcgagggaacgctcagttggccggacctgctcagtgacccgtccattgtgggtagcaatctgcggcagctggcacggggccaggcgggccatgggctgggcccagaggaggacggcttctccctggccagcccctactcgcctgccaaatccttctcagcatcagatgaagacctgatccagcaggtccttgccgagggggtcagcagcccagcccctacccaagacacccacatggaaacggacctgctcagcagcctgtccagcactcctggggagaagacagagacgctggcgctgcagaggctgggggagctggggccacccagcccaggcctgaactgggaacagccccaggcagcgaggctgtccaggacaggactggtggagggtctgcggaagcgcctgctgccggcctggtgtgcctccctggcccacgggctcagcctgctcctggtggctgtggctgtggctgtctcagggtgggtgggtgcgagcttccccccgggcgtgagtgttgcgtggctcctgtccagcagcgccagcttcctggcctcattcctcggctgggagccactgaaggtcttgctggaagccctgtacttctcactggtggccaagcggctgcacccggatgaagatgacaccctggtagagagcccggctgtgacgcctgtgagcgcacgtgtgccccgcgtacggccaccccacggctttgcactcttcctggccaaggaagaagcccgcaaggtcaagaggctacatggcatgctgcggagcctcctggtgtacatgctttttctgctggtgaccctgctggccagctatggggatgcctcatgccatgggcacgcctaccgtctgcaaagcgccatcaagcaggagctgcacagccgggccttcctggccatcacgcggtctgaggagctctggccatggatggcccacgtgctgctgccctacgtccacgggaaccagtccagcccagagctggggcccccacggctgcggcaggtgcggctgcaggaagcactctacccagaccctcccggccccagggtccacacgtgctcggccgcaggaggcttcagcaccagcgattacgacgttggctgggagagtcctcacaatggctcggggacgtgggcctattcagcgccggatctgctgggggcatggtcctggggctcctgtgccgtgtatgacagcgggggctacgtgcaggagctgggcctgagcctggaggagagccgcgaccggctgcgcttcctgcagctgcacaactggctggacaacaggagccgcgctgtgttcctggagctcacgcgctacagcccggccgtggggctgcacgccgccgtcacgctgcgcctcgagttcccggcggccggccgcgccctggccgccctcagcgtccgcccctttgcgctgcgccgcctcagcgcgggcctctcgctgcctctgctcacctcggtgtgcctgctgctgttcgccgtgcacttcgccgtggccgaggcccgtacttggcacagggaagggcgctggcgcgtgctgcggctcggagcctgggcgcggtggctgctggtggcgctgacggcggccacggcactggtacgcctcgcccagctgggtgccgctgaccgccagtggacccgtttcgtgcgcggccgcccgcgccgcttcactagcttcgaccaggtggcgcagctgagctccgcagcccgtggcctggcggcctcgctgctcttcctgcttttggtcaaggctgcccagcagctacgcttcgtgcgccagtggtccgtctttggcaagacattatgccgagctctgccagagctcctgggggtcaccttgggcctggtggtgctcggggtagcctacgcccagctggccatcctgctcgtgtcttcctgtgtggactccctctggagcgtggcccaggccctgttggtgctgtgccctgggactgggctctctaccctgtgtcctgccgagtcctggcacctgtcacccctgctgtgtgtggggctctgggcactgcggctgtggggcgccctacggctgggggctgttattctccgctggcgctaccacgccttgcgtggagagctgtaccggccggcctgggagccccaggactacgagatggtggagttgttcctgcgcaggctgcgcctctggatgggcctcagcaaggtcaaggagttccgccacaaagtccgctttgaagggatggagccgctgccctctcgctcctccaggggctccaaggtatccccggatgtgcccccacccagcgctggctccgatgcctcgcacccctccacctcctccagccagctggatgggctgagcgtgagcctgggccggctggggacaaggtgtgagcctgagccctcccgcctccaagccgtgttcgaggccctgctcacccagtttgaccgactcaaccaggccacagaggacgtctaccagctggagcagcagctgcacagcctgcaaggccgcaggagcagccgggcgcccgccggatcttcccgtggcccatccccgggcctgcggccagcactgcccagccgccttgcccgggccagtcggggtgtggacctggccactggccccagcaggacaccccttcgggccaagaacaaggtccaccccagcagcacttagtcctccttcctggcgggggtgggccgtggagtcggagtggacaccgctcagtattactttctgccgctgtcaaggccgagggccaggcagaatggctgcacgtaggttccccagagagcaggcaggggcatctgtctgtctgtgggcttcagcactttaaagaggctgtgtggccaaccaggacccagggtcccctccccagctcccttgggaaggacacagcagtattggacggtttctagcctctgagatgctaatttatttccccgagtcctcaggtacagcgggctgtgcccggccccaccccctgggcagatgtcccccactgctaaggctgctggcttcagggagggttagcctgcaccgccgccaccctgcccctaagttattacctctccagttcctaccgtactccctgcaccgtctcactgtgtgtctcgtgtcagtaatttatatggtgttaaaatgtgtatatttttgtatgtcactattttcactagggctgaggggcctgcgcccagagctggcctcccccaacacctgctgcgcttggtaggtgtggtggcgttatggcagcccggctgctgcttggatgcgagcttggccttgggccggtgctgggggcacagctgtctgccaggcactctcatcaccccagaggccttgtcatcctcccttgccccaggccaggtagcaagagagcagcgcccaggcctgctggcatcaggtctgggcaagtagcaggactaggcatgtcagaggaccccagggtggttagaggaaaagactcctcctgggggctggctcccagggtggaggaaggtgactgtgtgtgtgtgtgtgtgcgcgcgcgcacgcgcgagtgtgctgtatggcccaggcagcctcaaggccctcggagctggctgtgcctgcttctgtgtaccacttctgtgggcatggccgcttctagagcctcgacacccccccaacccccgcaccaagcagacaaagtcaataaaagagctgtctgactgc

SEQ ID NO: 107 - DNA, 10636 bp, Homo sapiens
gaggagagagcagagtataccgcagacatcatttctactacagtggcggagccgtacaggacctgtttcactgcagggggatccaaaacaagccccgtggagcagcagccagagcaacagcagccgcaagacattgtttctctccctctgcccccccttccccacgcaaccccagatccatttacactttacagttttacctcacaaaaactactacaagcaccaagctccctgatggaaaggagcatcgtgcatcaagtcaccagggtggtccattcaagctgcagatttgtttgtcatccttgtacagcaatctcctcctccactgccactacagggaagtgcatcacatgtcagcatactggagcatagtgaaagagtctattttgaagcttcaaacttagtgctgctgcagaccaggaacaagagagaaagagtggatttcagcctgcacggatggtcttgaaacacaaatggtttttggtctaggcgttttacactgagattctccactgccaccctttctactcaagcaaaatcttcgtgaaaagatctgctgcaaggaactgatagcttatggttctccattgtgatgaaagcacatggtacagttttccaaagaaattagaccattttcttcgtgagaaagaaatcgacgtgctgttttcatagggtatttctcacttctctgtgaaaggaagaaagaacacgcctgagcccaagagccctcaggagccctccagagcctgtgggaagtctccatggtgaagtataggctgaggctacctgtgaacagtacgcagtgaatgttcatccagagctgctgttggcggattgtacccacggggagatgattcctcatgaagagcctggatcccctacagaaatcaaatgtgactttccgtttatcagactaaaatcagagccatccagacagtgaaacagtcaccgtggaggggggacggcgaaaaatgaaatccaaccaagagcggagcaacgaatgcctgcctcccaagaagcgcgagatccccgccaccagccggtcctccgaggagaaggcccctaccctgcccagcgacaaccaccgggtggagggcacagcatggctcccgggcaaccctggtggccggggccacgggggcgggaggcatgggccggcagggacctcggtggagcttggtttacaacagggaataggtttacacaaagcattgtccacagggctggactactccccgcccagcgctcccaggtctgtccccgtggccaccacgctgcctgccgcgtacgccaccccgcagccagggaccccggtgtcccccgtgcagtacgctcacctgccgcacaccttccagttcattgggtcctcccaatacagtggaacctatgccagcttcatcccatcacagctgatccccccaaccgccaaccccgtcaccagtgcagtggcctcggccgcaggggccaccactccatcccagcgctcccagctggaggcctattccactctgctggccaacatgggcagtctgagccagacgccgggacacaaggctgagcagcagcagcagcagcagcagcagcagcagcagcagcatcagcatcagcagcagcagcagcagcagcagcagcagcagcagcagcagcacctcagcagggctccggggctcatcaccccggggtcccccccaccagcccagcagaaccagtacgtccacatttccagttctccgcagaacaccggccgcaccgcctctcctccggccatccccgtccacctccacccccaccagacgatgatcccacacacgctcaccctggggcccccctcccaggtcgtcatgcaatacgccgactccggcagccactttgtccctcgggaggccaccaagaaagctgagagcagccggctgcagcaggccatccaggccaaggaggtcctgaacggtgagatggagaagagccggcggtacggggccccgtcctcagccgacctgggcctgggcaaggcaggcggcaagtcggttcctcacccgtacgagtccaggcacgtggtggtccacccgagcccctcagactacagcagtcgtgatccttcgggggtccgggcctctgtgatggtcctgcccaacagcaacacgcccgcagctgacctggaggtgcaacaggccactcatcgtgaagcctccccttctaccctcaacgacaaaagtggcctgcatttagggaagcctggccaccggtcctacgcgctctcaccccacacggtcattcagaccacacacagtgcttcagagccactcccggtgggactgccagccacggccttctacgcagggactcaaccccctgtcatcggctacctgagcggccagcagcaagcaatcacctacgccggcagcctgccccagcacctggtgatccccggcacacagcccctgctcatcccggtcggcagcactgacatggaagcgtcgggggcagccccggccatagtcacgtcatccccccagtttgctgcagtgcctcacacgttcgtcaccaccgcccttcccaagagcgagaacttcaaccctgaggccctggtcacccaggccgcctacccagccatggtgcaggcccagatccacctgcctgtggtgcagtccgtggcctccccggcggcggctccccctacgctgcctccctacttcatgaaaggctccatcatccagttggccaacggggagctaaagaaggtggaagacttaaaaacagaagatttcatccagagtgcagagataagcaacgacctgaagatcgactccagcaccgtagagaggattgaagacagccatagcccgggcgtggccgtgatacagttcgccgtcggggagcaccgagcccaggtcagcgttgaagttttggtagagtatcctttttttgtgtttggacagggctggtcatcctgctgtccggagagaaccagccagctctttgatttgccgtgttccaaactctcagttggggatgtctgcatctcgcttaccctcaagaacctgaagaacggctctgttaaaaagggccagcccgtggatcccgccagcgtcctgctgaagcactcaaaggccgacggcctggcgggcagcagacacaggtatgccgagcaggaaaacggaatcaaccaggggagtgcccagatgctctctgagaatggcgaactgaagtttccagagaaaatgggattgcctgcagcgcccttcctcaccaaaatagaacccagcaagcccgcggcaacgaggaagaggaggtggtcggcgccagagagccgcaaactggagaagtcagaagacgaaccacctttgactcttcctaagccttctctaattcctcaggaggttaagatttgcattgaaggccggtctaatgtaggcaagtagaggcagcgtgggggaaaggaaacgtggctctcccttatcatttgtatccagattactgtactgtaggctaaaataacacagtatttacatgttatcttcttaattttaggtttctgttctaaccttgtcattagagttacagcaggtgtgtcgcaggagactggtgcatatgctttttccacgagtgtctgtcagtgagcgggcgggaggaagggcacagcaggagcggtcagggctccaggcatccccggggaagaaaggaacggggcttcacagtgcctgccttctctagcggcacagaagcagccgggggcgctgactcccgctagtgtcaggagaaaagtcccgtgggaagggtcctgcaggggtgcagggttgcacgcatgtgggggtgcacaggcgctgtggcggcgagtgagggtctctttttctctgcctccctctgcctcactctcttgctatcggcatgggccgggggggttcagagcagtgtcctcctggggttcccacgtgcaaaatcaacatcaggaacccagcttcagggcatcgcggagacgcgtcagatggcagatttggaaagttaaccatttaaaagaacatttttctctccaacatattttacaataaaagcaacttttaattgtatagatatatatttccccctatggggcctgactgcactgatatatattttttttaaagagcaactgccacatgcgggatttcatttctgctttttactagtgcagcgatgtcaccagggtgttgtggtggacagggaagcccctgctgtcatggccccacatggggtaaggggggttgggggtgggggagagggagagagcgaacacccacgctggtttctgtgcagtgttaggaaaaccaatcaggttattgcattgacttcactcccaagaggtagatgcaaactgcccttcagtgagagcaacagaagctcttcacgttgagtttgcgaaatctttttgtctttgaactctagtactgtttatagttcatgactatggacaactcgggtgccactttttttttttttcagattccagtgtgacatgaggaattagattttgaagatgagcatatattactatctttaagcatttaaaaatactgttcacactttattaccaagcatcttggtctctcattcaacaagtactgtatctcactttaaactctttggggaaaaaacaaaaacaaaaaaaactaagttgctttctttttttcaacactgtaactacatttcagctctgcagaattgctgaagagcaagatattgaaagtttcaatgtggtttaaagggatgaatgtgaattatgaactagtatgtgacaataaatgaccaccaagtactacctgacgggaggcacttttcactttgatgtctgagaatcagttcaaggcatatgcagagttggcagagaaactgagagaaaagggatggagaagagaatactcatttttgtccagtgtttttctttttaagatgaacttttaaagaaccttgcgatttgcacatattgagtttataacttgtgtgatattcctgcagtttttatccaataacattgtgggaaaggtttgggggactgaacgagcataaataaatgtagcaaaatttctttctaacctgcctaaactctaggccattttataaggttatgttcctttgaaaattcattttggtctttttaccacatctgtcacaaaaagccaggtcttagcgggctcttagaaactctgagaattttcttcagattcattgagagagttttccataaagacatttatatatgtgagcaagattttttttaaacaattactttattattgttgttattaatgttattttcagaatggcttttttttttctattcaaaatcaaatcgagatttaatgtttggtacaaacccagaaagggtatttcatagtttttaaacctttcattcccagagatccgaaatatcatttgtgggttttgaatgcatctttaaagtgctttaaaaaaaagttttataagtagggagaaatttttaaatattcttacttggatggctgcaactaaactgaacaaatacctgacttttcttttaccccattgaaaatagtactttcttcgtttcacaaattaaaaaaaaaatctggtatcaacccacattttggctgtctagtattcatttacatttagggttcaccaggactaatgatttttataaaccgttttctggggtgtaccaaaaacatttgaataggtttagaatagctagaatagttccttgactttcctcgaatttcattaccctctcagcatgcttgcagagagctgggtgggctcattcttgcagtcatactgcttatttagtgctgtattttttaaacgtttctgttcagagaacttgcttaatcttccatatattctgctcagggcacttgcaattattaggttttgtttttctttttgttttttagcctttgatggtaagaggaatacgggctgccacatagactttgttctcattaatatcactatttacaactcatgtggactcagaaaaacacacaccaccttttggcttacttcgagtattgaattgactggatccactaaaccaacactaagatgggaaaacacacatggtttggagcaataggaacatcatcataatttttgtggttctatttcaggtataggaattataaaataattggttctttctaaacacttgtcccatttcattctcttgcttttttagcatgtgcaatactttctgtgccaatagagtctgaccagtgtgctatatagttaaagctcattcccttttggctttttccttgtttggttgatcttccccattctggccagagcagggctggagggaaggagccaggagggagagagcctcccacctttcccctgctgcggatgctgagtgctggggcggggagccttcaggagccccgtgcgtctgccgccacgttgcagaaagagccagccaaggagacccgggggaggaaccgcagtgtcccctgtcaccacacggaatagtgaatgtggagtgtggagaggaaggaggcagattcatttctaagacgcactctggagccatgtagcctggagtcaacccattttccacggtcttttctgcaagtgggcaggcccctcctcggggtctgtgtccttgagacttggagccctgcctctgagcctggacgggaagtgtggcctgttgtgtgtgtgcgttctgagcgtgttggccagtggctgtggaggggaccacctgccacccacggtcaccactcccttgtggcagctttctcttcaaataggaagaacgcacagagggcaggagcctcctgtttgcagacgttggcgggccccgaggctcccagagcagcctctgtcaccgcttctgtgtagcaaacattaacgatgacaggggtagaaattcttcggtgccgttcagcttacaaggatcagccatgtgcctctgtactatgtccactttgcaatatttaccgacagccgtcttttgttctttctttcctgttttccatttttaaactagtaacagcaggccttttgcgtttacaatggaacacaatcaccaagaaattagtcagggcgaaaagaaaaaaataatactattaataagaaaccaacaaacaagaacctctctttctagggatttctaaatatataaaatgactgttccttagaatgtttaacttaagaattatttcagtttgtctgggccacactggggcagaggggggagggagggatacagagatggatgccacttacctcagatcttttaaagtggaaatccaaattgaattttcatttggactttcaggataattttctatgttggtcaacttttcgttttccctaactcacccagtttagtttgggatgatttgatttctgttgttgttgatcccatttctaacttggaattgtgagcctctatgttttctgttaggtgagtgtgttgggttttttccccccaccaggaagtggcagcatccctccttctcccctaaagggactctgcggaacctttcacacctctttctcagggacggggcaggtgtgtgtgtggtacactgacgtgtccagaagcagcactttgactgctctggagtagggttgtacaatttcaaggaatgtttggatttcctgcatcttgtggattactccttagataccgcatagattgcaatataatgctgcatgttcaagatgaacagtagctcctagtaatcataaaatccactctttgcacagtttgatctttactgaaatatgttgccaaaatttatttttgttgttgtagctctggattttgttttgttttgttttttaaggaaacgattgacaataccctttaacatctgtgactactaaggaaacctatttctttcatagagagaaaaatctccaatgcttttgaagacactaataccgtgctatttcagatatgggtgaggaagcagagctctcggtaccgaaggccgggcttcttgagctgtgttggttgtcatggctactgtttcatgaaccacaagcagctcaacagactggtctgttgccttctgaaaccctttgcacttcaatttgcaccaggtgaaaacagggccagcagactccatggcccaattcggtttcttcggtggtgatgtgaaaggagagaattacactttttttttttttaagtggcgtggaggcctttgcttccacatttgtttttaacccagaatttctgaaatagagaatttaagaacacatcaagtaataaatatacagagaatatacttttttataaagcacatgcatctgctattgtgttgggttggtttcctctcttttccacggacagtgttgtgtttctggcatagggaaactccaaacaacttgcacacctctactccggagctgagatttcttttacatagatgacctcgcttcaaatacgttaccttactgatgataggatcttttcttgtagcactataccttgtgggaatttttttttaaatgtacacctgatttgagaagctgaagaaaacaaaattttgaagcactcactttgaggagtacaggtaatgttttaaaaaattgcacaaaagaaaaatgaatgtcgaaatgattcattcagtgtttgaaagatatggctctgttgaaacaatgagtttcatactttgtttgtaaaaaaaaaaaagcagagaagggttgaaagttacatgtttttttgtatatagaaatttgtcatgtctaaatgatcagatttgtatggttatggcctggaagaattactacgtaaaaggctcttaaactatacctatgcttattgttatttttgttacatatagccctcgtctgagggaggggaactcggtattctgcgatttgagaatactgttcattcctatgctgaaagtacttctctgagctcccttcttagtctaaactcttaagccattgcaacttctttttcttcagagatgatgtttgacattttcagcacttcctgttcctataaacccaaagaatataatcttgaacacgaagtgtttgtaacaagggatccaggctaccaatcaaacaggactcattatggggacaaaaaaaaaaattatttcaccttctttccccccacacctcatttaaatggggggagtaaaaacatgatttcaatgtaaatgcctcattttattttagttttattttgatttttatttaatataaagaggccagaataaatacggagcatcttctcagaatagtattcctgtccaaaaatcaagccggacagtggaaactggacagctgtggggatattaagcacccccacttacaattcttaaattcagaatctcgtcccctcccttctcgttgaaggcaactgttctggtagctaactttctcctgtgtaatggcgggagggaacaccggcttcagtttttcatgtccccatgacttgcatacaaatggttcaactgtattaaaattaagtgcatttggccaataggtagtatctatacaataacaacaatctctaagaatttccataacttttcttatctgaaaggactcaagtcttccactgcagatacattggaggcttcacccacgttttctttccctttagtttgtttgctgtctggatggccaatgagcctgtctccttttctgtggccaatctgaaggccttcgttggaagtgttgtttacagtaatccttaccaagataacatactgtcctccagaataccaagtattaggtgacactagctcaagctgttgtcttcagagcagttaccaagaagctcggtgcacaggttttctctggttcttacaggaaccacctactctttcagttttctggcccaggagtggggtaaatcctttagttagtgcatttgaacttgatacctgtgcattcagttctgtgaatactgccctttttggcggggtttcctcatctccccagcctgaactgctcaactctaaacccaaattagtgtcagccgaaaggaggtttcaagatagtcctgtcagtatttgtggtgaccttcagattagacagtcttcatttccagccagtggagtcctggctccagagccatctctgagactcgtactactggatgttttaatatcagatcattacccaccatatgcctcccacaggccaagggaaaacagacaccagaacttgggttgagggcactaccagactgacatggccagtacagaggagaactagggaaggaatgatgttttgcaccttattgaaaagaaaattttaagtgcatacataatagttaagagcttttattgtgacaggagaacttttttccatatgcgtgcatactctctgtaattccagtgtaaaatattgtacttgcactagcttttttaaacaaatattaaaaaatggaagaattcatattctattttctaatcgtggtgtgtctatttgtaggatacactcgagtctgtttattgaattttatggtccctttctttgatggtgcttgcaggttttctaggtagaaattatttcattattataataaaacaatgtttgattcaaaatttgaacaaaattgttttaaataaattgtctgtataccagtacaagtttattgtttcagtatactcgtactaataaaataacagtgccaattgca

SEQ ID NO: 108 - DNA, 468000 bp, Homo sapiens
aatattttgccatctgaaaacaaaatatttcagtactaaaggtaatgagacagtttcatgagtatggtgtttatgttggatcttgcaggaagaaatagttacagattttggtggcagtttatggctttaaacttaatggctaagaaagtaaatgacacatttcttattaattgtttttaccatttgggtaatatacatatttagcttccttgagagaacatttaaattaattgactaactgtaatctgaattatgtgttttaatttaaggttgttaaaatcacgtaaattaactgcttgtgccaacgtaaaattacaatattagcttttttttaactgaaaattatctaaatgtaagatgtctaaaaatagagtggaggtggattggacagtttgcagattatgagttggaataaaaacatcgcagttaagccaaaaacatggcaaccaatattttctgttataaaaatatttgagatgaatttagtttttatgaaagctgtctgaaactgaaatgaatagcagaagctttctgtttattcacagtccagtaataataatacctgcagcacaaagcatacgtcttttctatataaagccaacaagcttctgctcctttctgaagtcgtctttgccaagcagggtgttgggggcgggggtgaggataggggtgaggggacattttacccggttatgctcttacgtactaaccttcaccttgacaaagcttgtcaacgaaaacaaaaccagtcagagccttttcaggaaactgatgttaactgtccactagaggctgtaatgagaccaacaatgtcactttagaccaacccgaggtttaaaccgtaacaataatcgatttttaaatggaaaaaaaaaagttgtagaaatgagtaagagtgaacactagtagttatacttaaatagccacatatatgtgcatggtatttcaaaaatgtgagaaaaaaatatttccggggctctgcaccttcctcgctcgtatgtttatttttatttatgaagcacgtaggctcttgcaggccagagttgtgtaaaaactgacactttttttttggtcatcctgtgccctgcctcagttggtgactaaccgttaggtcataagtaaactcagccaaaagatctctcaaatacagcttacagtcaagattggtggctttcagaaagaaacttacgcgaaaggatcatgtttccagacacttagttctaagcacctgaagaaggtcaaatgtcgcccgacacctaccggccttccagaatcatctgcaacaagaacgccgcactgagcgcccttagtctggaggcgcctcctagtcctccaggtgccacacctgttggcaaggtgcacccatccgaagaagattccttcgcgtggaggtcacacctggcggcgagacaggcggaggggcggggtggtgggagtcggagaccgcactgaaaccctgagtccagatttaagttcctcgtcgattctcgagaactgccatttgatgctccggttgctttctctgtctcctacactggttacctcatttccgattaaattaatgatccgaaattagctgcgagaggagtgcgcgggtctcctttccaggctagagcggagtagttccatatcaaagccgatttccggacctgcgtgcgaagagagaaagagggcagggtcgggcggtcgccagcgttcgccggcaggaaaggtgagggtacctgtgcagtcgggggaccccttgaaactttccggagttgcacgcagaggcaatccccgcggcccccaggcctgggttccggaacgccgaagcgacgccggtttgtggcttaacgtgcagctgatgatcagagtgagccctctcagatgctgctccgagcgcctgggaccaaggacacgtcgggattagaatgggccgacctcccctccccgctggggtgttgcatcggctcccagctgaagcctgacagcccttgggggagtcccccaggttgcctgagtagcgccccgttgtcgttcagtcccctccaactaggtgcagggacccagggaggcgcgcgaggaccgacccgtcaccgctcaaattacctcatcgcccagctccccgcccccttcccaaacctggaaggaaccttgccctccggtccgcgtctcccctcccccgcaccccatcccgagccactctttgggaaaggtgcccgcctccccgggcggcgcgcagcgaagggttaagggcgcgggccggccgccgcgcggtgcgctcgccgtgctctgtgcggctcgccgggccgcccgccagagggtgccccccacccccatgaagtcggatccttgagctgcggcggcggcagccaactgctccatatttggcttctattacacatttacatactggagcgagcgagcgagcgagcgcgagagagcgcgagggagggagggagggcgggcgggcggagggaggagggaggggaggggagcgggaggagggggaggaggaggaggaggaggaggaggagagagcagagtataccgcagacatcatttctactacagtggcggagccgtacaggacctgtttcactgcagggggatccaaaacaagccccgtggagcagcagccagagcaacagcagccgcaagacattgtttctctccctctgcccccccttccccacgcaaccccagatccatttacactttacagtaagtgactatttttttttcctcctccgattctttcccccctcccccattcccttctccccttatttagattaaaatccctcctcccccgatctcccgagaggggcaaaagcaacaaccagcaaacaaacccaaaaccccaatcggctgcacggaaaacagctggaagaggagcgaaggaaatcgacgcgtcgtgttctgtgtgtgtgcgtgtgtgtgtgtgtgtgtgtgtatgtgtgtacatacaaccgtccccggctccaggctcccgggccgacacccccactctgggcgcaggggcggccggcgggggggctgtcaggggctgggtgggcgcccgccgggctagggggcgcgcccgggcggggggcgcgggcggggagagcggcggcggcgccccgctcccccggctgctggtccggtcgcaagtgcggagagccatgtcctcctccctccgggtggcgcaggggggaggcggcggctggggttggggggtggtccctttcccggccgccctcttcccattcctcctccccggagagggcggtgagagagagggggtctcacggagggctggacttctccgcgggtggtcgcccggcctcggcgccctggggcgggggtctcccctcggagggccggcctcgccgggtgtgcggctgcgggcggggaagggactgctcctgcagccgggacgggactttgcgcgcggccgggtgccgggcggggggcgcagaggggtggcctcggggaccgcgcgggggtagcgggtgtgcgggtgcctggagcgcggctggagtggcggtgacggccctggccgccgccgccaccgccgccctgttggtgcggccgcttcctgatcatgtgcagcggcagccgccgcccggagccgggagcccgcgagcgccccagtccgggccggcgcccccgccagcacccgcggcaggagacgaggagccgcggcaggcgctgccctgagccgggagtgaacggctgcgcggctgctgggagggtgaatgaagccaggaggaggggaaggaggaggaggcggcggccgccgcggaggaggcgctgcggggattgggatgcgccctggagccccactgctcgttcactctgggccgggccggagactctgccactcccgggggcgccgccgcctcctcctacgtggttccagtgctgcgcgcaggccggtcccgcagggggcagggaagggggccggacgggcggagcgagaggtgaggcggtgtcggagcgcggcgtgagtgtgagtgagtgtgtgagtgactgtgtgtgtgtatttgtgcgcgcgcgcgccgggcggggggcgagggccgtcgcgacgcggagggggcccttccttggctacttggctgactctgcagcgccccgacccctcttcagccccccgccttcaggctgccttcttaaactccgtggcttgtgctttcattttgtttcagaccacgtagggggctgactgaaagggatgaaacaattcaggttttctagggagattgagcaagaaccttagtgggggtggaagtagggtggtgatcgagactctgccagaaaacaaaacaaaacaaaaaaaaatccgtttctaaggacggcggggattcggttcgagcccgtggctgctctgttttgttttgctttcttggtatataatcctacagataaaagggtaatataaatatttgagaagagggaaattgctgaagagtagtaagggcaaaaaaaaaaaaaaaaaaaaaaaaaaaacagtcggaagaagctggttatataatgcgcgatgtggctaacaagaaaggcaagctatttttattttgtttaccgtatgctgtgcagtagggactcctccaaactggttctgtccccgaagagattcttagcttccctgcgagatccacaggatacaattagcaaaattagaagaccctattacacccacagaataaaaactaatgccttacagtggctttctccctgcacatcctgtcgtgcatgcacgggaatgtgtgtatgcaaataagttctcctttggcaatctagtagtcacatctcaatgacatttgtgttttataatgcaggctgtttttaatatttaaacatcattgttatatattgcacacagcagtgggtagttacttggttatttttaggcacagctagttactttttcaacagtgttagctgagacatttctgtttgggttttttaggaggctgcagttcctagaagccccccttaagcccacccttcggtttatttgatgggtaaaggtagtttgatacttgagctttttttggagtgaagcttatgtctgaggaaaccaccagagagaagagaaaatcctgcacaggaactcttggaaagggattgcaccataacggctagcgctgtggcatttaatctcctctgattgccctctcactgtgcatgcatcagtcaatattttagcagctccgcaaataaatggacttgaatgccatcttctacataaagcagaggttgaagggctcccctgaacctcctggctgcctgtcagtggtgtaggttttcggtgcacttactccagtcctgatcactcatgtaattagatcaggctgccatggcaacagacagtgttcctcgtccattcaggtgggtttgtcttgtgcctgaactactccaagtgttttatgcacagcatttatgctgcccaagccagacgagagactccactatttcaattgcatcttctttcagtcatttggatgggagacactgaatgaggcttctagctactcaacttttataaaggagaccaacaagctgttcttcctaggtgcagtatgtaaatgcatctccccagacagtgaaaggagcctgacaatcctgctggtgtttattgtgaacagatcaacaagtatttggtacttgttagaaacctttcagagctcactaaagcaacatttcttttgcagtctggtgcctttggccttgcagtcagtcacttaaccctttcaagtgtgaagagcgttcatcatttggaacctccattgcccatagcgatggctggatttctaaagggtttactcaggggaataacttattcggaaaatatattcccattgtcacattttaaaacttgacagccatcataacaaaaactggtactgacagtaggcagacattctgaatgtattcattcttaatttggatctattggctgtgatttgaatgatctttggtagtaagttaaaaggatttttttttccttagctaagcgagaaacgatagaggcctatagctagaggactgatagtgcatggtgcttttggacaataaacatgtactttattttaggatgtaatttagtgagcagttagaaagcagtattctagtctttgcattagggcaccactgataaagctggctaagcaaagagaaataatattatggcaaaaaggaaaaaaggaaaagttgctttagttgctgaagctctgtgctgctcaggcaatccaactaagtggggcagggggcgggcgggggggagtattttcataaccctggtatttgaaagaaaagataattgagaattatgtcttgatttagttgtgactgccagtcagtttacaattttatggccaacaaagctaaactggtaaattttttcccccagggctaggattgagagagctactcaactctattcccagggggtttatgagtttttaccgttttgtgagtttatgtggttggtaaattcattgtggcctggtcagatgaagcactgctgtagttaaaatgagctattatttcttctagctactcaacttttataaggtggtaaatagatgggaagcaaggatgtcaatattacacaatgccttggaggtcctggattctattttgcaacatatagaaaaatgctttacttgcagtaaaatgtgaacatatatttttcagtgcacaaataaattcatgtgaaaataagtataaaaaaatgtacctggtgggaaccgccaaaggcaatatttttccttgcggatttcgttttaagagggtttggtaaacagaagtgacactttgtcaaaaatgttacgactagacttcaggacttctgaattgtcttttacacttagaggaagattaaacagaaactctttagccacaagattacatgtcaaatgcctgtaagtttcaacatacctaagtcagttgcctaggagtcctgggaaaggccagtgctgagattattgaaatattagtaaacattactatgactcctgtttttgttgtcattatggagtccaaggacgcacatttctttgaataatgttgtgcctttattgtttttcattctgaaatgtcaagtggattttacttttttgcacataccttgagtgacagtttctgatgactaacactaacactcattttgtttcctattaaaagttaagcaataaacatattttactaaaattctgaaactcacgtaagtaggtaaatgtgggagtgaatgttaattctttaaactgtagttatctgaaaataacacatagattaggatctgaacagcttaaatacttgcatcggtaaagtgacaatagtgaagtaagacaggctattatttttaggggagagatagattatttgactttccttgctctgtattttcagagtaattcaatagttcgaatgattagtttctgtgagagatttagatctgtgcagcttaattgcttcaaataacagatttagttctggtcatacttccaaggttatcagaagcaggccctccttattttgataaaagcattgaaagcaatacattgtagaaatggtaatagaaataataatttctgttttaggaccttacatatagaacttccttttctaagataagaattttaagtcatcaattatgttcacattttattttcatgtaatttagtttaataaaataaatgtactcattcaaaatttttttaagaagtgatatacagtgtcagttttacagaattttttaaatgttggctgaaagaacggtaattacattgagatttttaaaaatatataaatgcttaaaattacagaagtaataaaaagaatggttttagacaaatcttatggaaagttttttattttattcttttataattatatttatggatatttgtctttattagtgtagtaatatattttataacgctcataatttgaactttcaggctaatgtactataaatatttgtattacgcattactaccatcccaaatgtaccaaaacacgtttagagagaacaattatggacaaaaaagcaacaagcattatattttgtttgacatatttcatgttagcagaaatgtttcattgatttttctgtaacttttaatgcatcccatttgtggagtaatgaaaatgtaatgataattgccacaatgtaagcaaaaattgtatcctacctgaaaattactttccagaaaattcatggtagtgtactcagaatttgagactcaagagggcagaggtttccccgattgtgatgttttgatttgggctaagaggaactctttttttttttttttacacttaggtgccctttaacatgacaagttttgaatgagttaggtagcagaagtttttcgtgacagttattgtagctactaacctatagcatctatccttctaacgttcaaagaaaatatatttttctgtcactgtgtatggcaaactttattttcttgtgcccttaattttgttcccctttctcacattatctcctggtacttactgaccattacctcagttttgtttaggccgtctttcttgttaatcttccaatattaatagtattgtattatgttgctctgctgggttttaaaaatattgagtattccatttttggtgtatattattgtataaaatgtcctataaattattttctggtatattattttgtaagtttttgcagtgaatacgtgctgccttgcttgtattcttgccttcttccctctgatggaatacaagttatgtaaactctctgtattatcctaactagtgcagcaacacaaatacttttgaaataagaaagcatactcatgcaagagtaaagtaatcttctatggcatttacatcatgtttgaccctcctctgcacttcagcaaactaggaggaggttgtaacttggactctataaaaccttatctgccaggtgatatgtaaacaggattgtgtgcacacacattgtcatataggcaaacactctcccaactggtgagctcataaaaagcactgtctgtaaatttatggtacctgcacctcatttgagaatcaagtattttgatgcttaatttgagatgacatcatgatcctccctccctgcttcctcatccttaaagaagtactaagattaaatagaattttgtcaacttctacttaacttggccattatttatatttgtaactcaacaggcttcttggtggagggactgtgccttctaaagatctgaaagaccttatagtgtataacagcttaccttccttctctgtacgcacagatcacatgtggggaaaccaaggactacaagaattccttcttttgcatatcagtcctcggcaggcaatcaatgcttaaataaatgcttggtgaatggattagttagaagtaagaacattttggctactgttcattactttgaaaagtgctggaaagaagtggaagttattttcctttccagctgggctgtgctcttaaaaatagtgagtgtgtatggatgaaaataatcatgagtaccgagatgtgttgccatgtacccaaggataattggctcacttacctgtttacggattattcacattggagatcatattcatagctccagaatagtttctttctgacatccaatataaacctgggcctccttcttcctactgttacctggcgtgagcttaggaaacccaaactaagtttaaaatcagcctaagcaaatgtgcagatcagctccagtaatcaaagactgaaaatcagtccagcattcactagtttggggatgattttatagtaaccctgctactgattttaaaaaaatttttttttctgtttaatgtggataattggtaattaccggtatttaagaatataattttaatggatagggctaaaaaaatacgttagcagatcgagtcctcaacttcttccgtttctatgcataggttttacctcacaaaaactactacaagcaccaagctccctgatggaaaggtatatggaagattcattcattctttctttcattcatccattcacacattcactcattcatcatacaatggaaaatttttacttaaccatgtgcaaggaattgtggcaaaatgaaaatgagatgtacattcagtatttaaataaagtttagtggaaagtttagtgaatataaatgcacactttacactttttttctgcattttttcctttcttctattccattggactggtatgctaatagctgtgcactttcatcattgtgtttcaagttgcatgttgatagataatatatgccacattaaaattaggctttggctcaattactattcaatccatgcccattttcacctgatactccttgtagttaccagcatgtgtttatcagatgattggctagaatcattggagaaaagaatgacagcggctggctcaaatggggagaccatcctcttaatttgatggaagggatgacctttttgtatgttggcctccctctgagccttgttgagtaaaaccagacctgccttttgagctggctgggatctgtgtaattctcatacaacagaatgccgaatgtgatgttcttaaaatttgtatttcggtgcatagacacttaaggtggacttattttttaaagcagtctattctgtttttcattttggatttcctctcctgcactccctcgaccattgcaggagcatcgtgcatcaagtcaccagggtggtccattcaagctgcagatttgtttgtcatccttgtacagcaatctcctcctccactgccactacagggaagtgcatcacatgtcaggtgagagttttgcgatgctctctgttttccatctgaggataaagtcctgacctggaaaattgcctcctagccatgctcccttactttgttggctgttgaatatcattttctttgcaaactctgtttgggcatagtgtgggaagttgagaaattgccaagattgttttttaaaacttcgattaaagtatctatctatttggtttaatctatatgttcatgaagactttcatttgactttgcgatgattgataattgccaattggggcttgaacctcatcattttaattgtcagttttccttaatacaattaagaatgctatgctaccagatatcttaagtcacagtttttgcattttagattactgttgtagtataatatgtgcgtagcaaaacagagacctatttgtttaggggaaccagtatttgttgaatcttgaatttctttgtgtctgtttggattttacaacttcctgattttcccacgtacagtaagtttttctggcctggagagtcatgcagacatagggtgtatgcaatggtgatgactcatggttctctattgaagaaagggccagaggatattgcctcaaattaaatcaggaaggaaaaagaggtttgctagaacttggggcagtaagggcttgggaacacaagggtttgagtgtatgtaaccaagggagattgtgaaatagaaaataggggatcaatttctatttgccttggaaatggacctgcttgaaactgtgaagacagactagattagaggttcccaagcctggctaggcaacagaatcacctggagagcttaaaaaaatagaatttggagctccaccctagacttgatgaatcagaatgtttcctgctggaatcattgatctgtctaggcactgatgctccacaggtttgggaacccctgggtcggccggtcttccagcaactcttcctaagttatgttctgtagacttagttggtgagaagctcattctacttttagcaaatctcccatttgaaaatttgaattttcaaaactcatttttcaagaggtagatggatatttgctttataacaggttcatttaaacaataattgaccagatttctttgaagaaagagctgcctctttaccgtaagagccaatttttaagttacatataaattctctggcatcttagataagagcatggagctccgtaatcaacccatctggacttaagatctggagctgccactatgaccttgagtagtcctatgtcctttcaatgcctcagtttattcatgtataagatggaggtaatattagaactttcttatagggctgctgtgaggatggactggagtaaaatagtagatatactgtgggtagaatagtacctggtgtatggtttgtatcttttaacagatgctatcaagtaacttatccctcaacaggttgattgttatggtcatgttttatgatggttgctcctgaaccatacatgactagaaatatgtaaatatacctggaccttggtctttggacccaccctgtagacatctacggctctgcaaagccaaggagccttttatttgtttttgctgaattttaaattctgaatttatcacaactctctgactgatgggatgcatgtgtggtttttttttttttagattgttgtaaaatgaactgatgaattgcatgcataaatgtggttatttgtggtctgagtaaaaataaacaaaaacctgagtgactgaagtattatgcctcaggaaaaacagccaaaaaagtcccagtgggggacaaggtggaggagggaagagtcatcacagacacgatactcttgtaaaatatggaactggattccttacattttattggctgtggattagagaggtgttctttaagtggaaatgtaacctaaagttacatgcaaaggtaagcctcttaagatctacaagtgtcagctgaatgaaaaaggtagggtgggccaggcacagtggctcatgcctttaatcccagcactttgggaggctgaggtgggtgaatcacttgaggtcaggagtttgagaccagcctggccaacatgatgaaatcctgtctctactaaaaatataaaaattagccaggcattgtggcaggttcctgtaatcccagctacttgggacactgaggcaggagaatcgcttgaatcctggaggcagaggttgcagtgagcccaggtctcgccactgcactccagcctgggcgacagagtgagactccatctcaaaaaaaaaaaaaaaaaagagaggaaagaaaagaaaaaggtagagtgtcttactgctactttatctcttagggatgatactcattttaacggttatgtgctaggctgaaaatcctcacatttagatctttggggaaatagtttaattgcaaatgggttgagtacacgtgcattttttttaacctgtggtgttgaaagggagtcatttgtgataacagaaatatctcaagaattttattgtgaaaaaacaggcagcaaaaagtcatatctcttggtcaatatgggcagcttattgagaagagacctaggtttttataatatgttaggcaagtttaagtgtcttatgaatactaaaatactgacgaagtagcgcaaagtcaccttgaattttaagcgctgacattttctatgattgcatttaaagaaagcttataagcattatctaaacattttgcatcaataatggcctcattacagtcctcacgattgacggctcaacgtaggcagaaaaatagtatcattcatgttgtactcttttatattcattcagtttttttcttaaacctacattatagttctttctggttctagttattttataaatatgatacagctatagcaagttatgacctaacttgttcacagtcactatttatgtaaagaaatgattcattcatttattcattgtgaatttttttaaaactactgcatggtgctgtgggaatggaagtgaataagagctaccggaaggcagttattttcttcctggtcaggcaggggaaagaagaaactctctgaaataatgaatacgaatagaatggggttctaacagtgttctaacagtgaaggaattcagaagagtgacgctgagtaggagtgatcaggaaagactttgaggaggagggatcacttgagttgagctctgctgactagattgcatttctgtgggaagagatggatggagcatgaggaaggccatgtgtgtgtctgggacataacaagccaatgcacggtatgtaactgaccaggacattttgactgaagcctaggtgctggtggacatctgaatttctggattcgagcagacagtagagagtatgggaataaaactgccgagaggtcaagtctgaagataaatttggaggagtccttggcataaaagtgatctttgaaattgggttcttgggcctggcaaaaagtttgacacccaggagggggatgactgaattcagggatgacgtcagctggtgtagaatgtgtagagagaaggtaagaggcagcggagagtagcttcaacattgatgtggcatggccttcgtctgccttcttttcatgatctggggtgaaggaggctgggtggctggaggagttgggtgatgtatgcgtgggccataaggactcttctgcagctcaggcaccttggaaactcagtgctgaactacagttcaatgaaatcttgtcaaaacctctcttcctttaagacctttaaaaaaataggaacttgagctaattttagctaaatctaatgtgtgtgtgtataaaaatgaatgctgcgtttgaaattcagcgtatgcggtatctcgttaaacaaatgatccttctattttcctctaaacagttttattaagattttcagtgaagccctgtacgttttaacaacaattccagcatttctttgatcttttctaccgttgatttattcatctcacatgatatgcgtaaatcacaatgtgccatctacttgactctgtagcaattgttcatttgtggcaattcatttactgtactttgataaaccacattaatttgggtgtgttttgtaactttagaggattccctggaggctttctgcagactctttaaaatgtgagatgtgtgtgtttttgtgcgtgcgtgtatactgtatatacctagctactagacacagctctttgaacaatttggcttcccatttatactttatagaaaataaagagatatagaattggtgaatcttgggtctggggagaaagttagtctaagacttcctgatgtaaagtgaaagagaaggctggagatgatgttacgatgatgttagtgagcagtctgatttaatgtaatgagagaaaatttgaggattaagttgtggtttttttttttggtgctgagttagttaggatgggctctctgtgtagcccaaaagggctcagaataaaagcagtgacttatttaactttcatcaaagacaagaaggttaagacaggaacaagagggatggagcaaacaactccaggggcagatcgttcttgtctgcaattatttaatgagcatctaatgtatgagacgcattatgccaacaaggccctctagggaatatggagatgatcaatagttcacatttactattctgcatattaacttattgaatcctcattacagtcctttgaggtaggcatcattattttctccattgcacaggcgaggaaactgtggcacagagagggtgaataatttccccaaggtttcccagctgttaagtgatagaatcgtgcttggatcccagtctacactctcagccctgttccttaagccctgtccttaagaagcttacagtcgagtgcataaggcaaggcatggcttggagtaatatttaaagagccatgacacaggtaacacagtctaggaagtcaggatcaaggaagggtccttccttggagccttctcttttgatgcctgcctgtctgttcagtcacatatgagctttctgacacaggctgtcccatgcaggctttgtggtgttttctccctttctttcactcttactcatatctccttgagattcctatgcactttcaataattattaattgaagaaaatgatgacagtggcaatttgcttatccgtttcaggggattggcttaagttggatccaaatgttattcagcatcaagagtctcagcgagatgatgaacttttgactcttaaaagaacttcactgggtcattgctcagcttgcaagatttggcagatatgaactatttgtctctccagtgtgataggtggtggtgtggcgctgaacgcaagctctaagaataaaacgtgcagcaaaaggaggtcacgctttagtcagggtggccataaggaagcttagaactcacatcccctctgcccctgcctcgcccagtctcattttctctccttcactagaacagtgaatgaatctgagctcattcatgtcaagatgatagagaagaaagatcactttctcttagctggcttagggaaggccagattgtctttcttacactgagtgaaaaattactgaggacttttgttttttttttttttggtcttcaaggcaacatctcttgcttttacagacccacggaaatcgagaagaggatgcaagatttactattcgtgccctagcctggcagcttcagcctacatcacagctgtaatcatatgtgatgcatttttatttacagattagtaggctctgactctgacatatgactaaccgggaagctcctccctgtaacagttgtatgtcgtctgcttcagagaactaattgcttggcaattcccctttggtaattccctctttattttctgatgagttacttaacagcgatgggcttgttgagcagagcgtggagtttaatgtgtgctccagaaactccactgtaggcctgggggatatgtttttcgagttctgtttagctttactgaaggaacagtgaaaccattatatggcctgttaatatttcactcaataccagattaaacaccgagcagcgtgcagttttccaaaagaaatcaaaaccaggcttctttttaaaatgtgcccctgtgcattagaaaattattaaaaaggaatttaatatgtatagaatgtttaatgatcttttgaaaatatggtttcaaatggagtagtcttccaggaccctacagagtgagtatggtgtgctgttggactggtagtttggaggctcagtttctgttgcctgccctgcaacaggatgacttgtgctactcactgtaccttgctgggtctcagttttcctgtctccaaaacacaaggaggttgaaagaaatgatctctcgggactcttctatctctgacattgtacagttccatgaatagattttattgtaattcttgctcccggctcccccaagacctttgcttctgtcaaacatcatttgctgttgtttgactttgttagattttgtatttaattagaatttatattttagctattattatgtcattatttatagagtaagtcataagcggtgcctaaattcatttatcaccccatctatattagtttcatacctgaatacttcctccgctcctttttactgttcttgctaccatgtcccaaacaacatccatttctggaggtggaatgcagtataactggaaagaatctttcagctgattgtgggattattttttgcaagaggagtgcagaagctctgcttttctaagcagtaatatcaagggccatattctgcttttaatttgcaagtagaaatcgttttgatgtcatttggttttacctgcaggtgcaggttttagtctctaggtaattccttttctcttctgcgtcaactttcccaattagtgtgtgcagcattgccttgtctttttggttaattcataagcagttcatacagatgcctcttgattcattgcaattattaatagtttctttaggcagctagtgcaaatagaaaaggtgacatttgagagggtttgttgttttaatttatttgtttcatagacagagagggagggtgaaaatgaaggctttaaagtcagggagattgaggcttgaatccttctggctctggctcctggctttgtggtccaggtcacattccttaaatctgtgatcctcaatttcctcatctgttgaatggggatgataatatcacctaactcacagaatcactggaaagattaaatgtgcactcactctctagatgttgcttatggtagtatctcaataactaataaaaacagacacacacacacacacacacacacacacacacacacacacggaaggcatagcatttaagagctgaataaaaaaagcaagaacaaaggaaagtgctgcatttgaggtatagtcagggtaggaggagcttctcagagcagccagttttagtaggcagagtttgaatctcaaaaggacctttgaaatttgggaaggactaagcaccctccactaacctgtcagtgacgttttctgcaggtagctcttgggaaggactaagcaccctccactaacctggcagtgacgttttccgcaggtagctctgctctacagaaaagagtgtttactacacatgactgataaaaataccatgtttttaaacatgtattgcccaaaccttacaataataaaggaaagccaataaaagcaaaagttccctttgattccaccattccagtccataaatcaagttcatttttatgtgttgttttttagttcttgatgatgtaacttatatctttttttcagttttgtgtttcccatttagcataaacattcttagtaacttcagctatacagttctcatttgcaaggatcacataacattctatcaggttgttttatcttaatttttaagtttcctatcatttttggacattcgagttgtttctaattgtttactgttgtaaagccgcagcgaatgtctttgcacacaagtatttaccgaggacacactcacatcagaaggctcaatactaagttagagggagcttgctctgaattgctttctaaaaggctgtaccaatttacattgttactaatgatataagaatgtctctagcttcaatcttaataattgtgggacttactattttttggctaatttaataggctctttggttttaaagttttcattcctttgatccctctcagagatggaacatttccatctgtgtttatttactaattgttctttttacaattagcaaatggaagtcttgatgttttctaatctatgtatatgagctctttatatgttctagatattaatccatttaaaaagtcctatttgctacagctacttccctagtccagtgtcctttcatttcagtgatgatgctttttgttgtacaacggttcaagtttttatatgatcagcctctcttttcttctacttgtacccagggccaacctggcaggaataaatgagattaccgcagctcaaattctgcaccaggctggcgagtggtccactggatggctttgctgggaatagctctttctttcttctgctcacttttccccttgggaactgtttcctgttgaagtcccagtctttctatttccaagggcccctttccccttctcccacctgcccctcactccttgattctcacccaccctgtgccggtttcctggctgtggcatcctctctgcccagttctcaaccctccgttgctgacctgtgtgtttctcagggagccctgtcctgggagcagtgggtagaaacatgtctggcagcctccctgactagggcctagagagatcagtcaggaatctcaggcctggccaaagtctaaccattatccaagtctctggggtcggggtctttacaacttctgtcttacatttctgctacgtagcaggctgccctgctaaggaatgggctccttggcgctggttttcatccatgtaggaaccagagaggcacgatgctaccctgattcctttcctgttgtagctcttctccggggatagctcttccagtggaaggttgggaacaacttcctagggattgaattttttgaggaaggctggtctcaaagtgtgagttttagctgagtggctctgctgagctggggtggtttggcatatgatatacctcctaaatggcctgtctagatgtattgttgttctggtccaacatgtttttcctctttgaagccaaaatgaacatttgttagtatttgaaatctgctgacatctctgtttttcttaactccctccctgggttctcatggtcctcaggataaagtctagaatccttagcctggctccataggttttgaggaccttccttatctctccagcctcatcactcacatgttgccctgtattcgtcccacgtcggtcccatcgcacttcctccttcaagtgccatactctgttttttgctccagcctttagacatgttgttcttcctccttagaacccagctcctctctctgcactgtctggctacctttccctcattcttgaaatctcagcttagagtctcttcctcacgaagcccttggactagggactatgttatttgctaccttttctgggttcccatagcaccccattcttccccttgtataatacttcacaacccctttcctggcccagcgataggagggactgccctctttccagtatgtggcatctagtgaatgggcaatacatacgggcattccccctgtgatgcttatgttacaaattggatgtgattccatctattaatatggactgtgatgtatataattgtggtgtgtataattgtggtcaggaaccagcatggggtcctgtgaaccacagtggtggaaaaagctatggcacctgtttgttccactggctttgtgctttgtccatcacacagtgagtgaaaaggtgacaaaaatgtgtaagaagcctgtgctaaggagaaagaaaggtccaatgatgaattttctggaaagaaagctgtacgtaatagagtgctgaattcgctcaatcatatttaagttttatagtactgcacttataaccacacaaaacactattattattgaaattcaatacaggaaaaatgcttttgtttttgaacgtctaagactgtcttcctcctcattgaaaaaattcctactgaatttcgattatatgaagatttttagaaatgcagctattgcatcgaatgaataaatgaatttgaggttcacgttcttaacatctgttttctgactttgatcagtctcctttaagtgctctcgtggtcatactctgcaactcaggtgaaagtttctagtgagatagttatcccaaggagatacttttatctggaagagagtagttctgaagttctaagtgaggttggttggttagatttaggttaaggtaccacatggaaaggagaactgcttaaaggggtagggtgaccatgaaaccttcttctgcaaaccctgctcgtcaagtatgaaaccggtggggtaggaggtccatctaatcttatctgtgcccttttgagttggccggccgggtgaccatccatctcctctgggttgtaaatgacttcatctcgaagttgcactgttggtggtaggtgaggacgccttctccaggtggagggagtgcatttgtggttgatggtgtgagcgaccatatgttggaccatatgtcagaacctgttaagagattctgacaggtatggaaatgcctcccattggaaactgaagccctgggtcctttgaccgctgcagcacccccagaggagagtaccctaaggcccttttaaccttgccctgccctggcaggttccaaggggaggcagaaatgactctggatgaattttgttttgattattcttccccttttccaggctctgtgtccagttcacctctggagctgcctgggtcactgcaacccagactagagagaagtatgaccccaagttgtggcttttattgggagacagccttcatctaaggaagtgggaaagaatgtgttccccagctgctgcctttctggtgtctgatctgatacttttcaaaagatagcagttttgtttggtttgatttggattttttttttcttttgtaagtggtcatagacccataagacaagtttattattgtattgacagaagaaaaaaatgccatggttatttatttaaaaatctctttccatacaactttgctttctattgagtttgaaggaaatatggtgatggcatctaagcccaaatttcggtgttttattttggctttcctgttctgtttaagcctctgtaaccccttgaacctttctctactcttcagaaggaacaagttatattttttttccatctcaacatcgtccaaatgaaccgtactattttaacaatctgtgtaaacagatataaaaggaggaagactactttctttaattttcctcccagcgagctgcaaagctgtttcagtcatcctagtgattagcagaatgtgagtaataaacaacattaaaatgaagaaacgtctttctgagtaggaccttgaaatgtgggtctcaccagtagtatatgagccttcctcagactaaactccatgacacagttcatatcatctttaagtcctggagggagggttttttaatatgtgtaaatgaccaaacacagctgttggctgtcctgctgtacagagaacattcggtgacctgaaatcgcaaagtttctgtctctgaagggtgcacttaatttaactttttgccctgaagtctcaagaaatgagacttcctttaaaaaaagtgttcttaaaactttctcattttaaatgtccagggtcttcaaagagtatactgggaggaaagtcctgtgtttcctgtttctcttgtaggactagtcaaaagtaccctttctcttgatggtattctgcagtctgagcctctgatttagtaactacagcctttaaaaccacagttatccagaccatgtgcagtggttaatgtgtcatgagtctgcctcagctgataatagcacatcacagaattcagagtgccttagataaattgtttcagtggatagtcataatgactgcttgagtagaaaagtaccctcattttctaggggagaaaacagaacctacgaggttgactgatttactagattccagtggttagaaatacatgtagcctgtgctgtaaacctgattttctgacttgtagttcagctctcttctccatctccttgtacagccaagataccccagaaattatttgcgtttccgaagttgtaggatgaaaagacatgtctttgcttaactgagttagccccctagaacaatattgagatggagctggaatggtgaagaaatgcaagagtccaatcccttgggtatgtgcaattcccagttaccccttgaaacagtgcttcattataaatttagatgttagaggctgggcatggtggctcatgcctcgaatcccagtgctttgggaggccaaggcggtgggatcgcctgaggctaggagttcaagaccagcctgggccacagagtgagaccctgtctctaaaaaaaataaataaataaataaaaaattatatgttagatgtttttatagtgccggagcctaaacttgatggataaacagagaatgattttcattttgcagccactgcacctttaaagttgagctttttgaggtgtatttcctttaatgcacccatgacagcaaggttgaaaacatcaggaaatcaaattgatctcatatatggaatcttgaaatttaatgtcatctgctctgagaagtccttgtggatgggaagattgtacaatcagatcatttctctgtgtaggtatctgctgtctttctactagatgttacagaagagattagaagaagctcttccagccacctgtgaatcagctttattctgctaggcaagaaggagctggtgctggacatttgtatctgcaaaaaccatgagttacttccccaataattaagtatctactgttacaacatctagtggctaatcttttagtaaaatacactgtccatctcttggtgccagaagcaataactattatgaagccttttctttctttgcagaagtagtttgctggtgaccatattgttagttgcagaaatactcagaatctgattcacatttagacttgacagaagccagattttatatctggaaacctcattagtgaaactgcaaacaagacaaaggccatctatctctctcttaggtgccctcctcaatctctttacagcttttcccccaggagtcaaggagatacagcctggcagggacttttgcttggtgatggagtagctaagaatgtttctctctaacaggtcacagaacagaaagtgctggtggacatctcttcttgccccaagatcttcgttggaagtccccgggacttggtgtctttgccgttcaaagtgtttatgaactcgccaggaggcataatgtgtcaccattttattctgggccaccctaaaggatgacacccagcttcagagacctcctcttggacgacatccctgagaatcaatgttttagctgtcccatagtctgacgtctgtttccgaccgcttttgagctggcgcaggcttagtcattaatggccaggacgatgttaaatgttctgcctgattggcttgcagctacacaccttttgtcatttgcagagcagcaactccctcttgagctcttggggagtctttacacaaatacactagaaaaaaggcacccatccattttttttccatcttggcattagctcacaggcatagtcctgggatgacctggagtagaggcagtggaggataaattcatcttgcacagacttgtttgtgctagttctagcctgtctctcgccacagatctagcttttaaatactcaagtgattggttttgtgtaggaatgtgtggattgttggattggaagaattttctccctggatttctagtgtttacataagcagatacaaaaaaaatttgatcactgatttaaatagcagggcttattttaaaaagttatgggtgcttcaaggtggtacagaataaaaatgtcagggttttttttttttttttttttaacaagtcgtaacacaaccaaaatgtatatattaatgttttgtcaggaaagggtcaaaatggaaaatttgcaacaaagacaaactacaatagaacaagtgcaaacagaagctgacaaatatatgcccctcgttgggagttcagcccatggaatgttatgtaggacaaaaggaatggaagagatatttcagtaacattttgttctctgtcaaaaaccttctgaaatataaatctgctgtgtattggagaatggatacagcaattgattcaagttgaatagctttcatttaactagaatatcccacagaaagcagttcttgttctgacaaccatatttttgctttctttcacttaaagaaaattgaattcatgtttacatatcttatagggttgttttatggacaaagacacgggtcaaaccccatcacagtggctagtgttacaacaaatagaaacatttctaaatgaaataacatttctaagccagggccagtgcctgcagtaataatactaggttggtattatgaagccatttgcaactataaataattcagtcatagatgtgctttttttaaaatcctggttttttaaaattctagtcttttgccaatacacacacccatacacatacttcacctatttgcataatagaggaggaatatgaatatgtatataataaagtcactttattttggactttctgaaacagattaccttttttcttctcctcatgatggctccctgagttgcttccaattgttgaaattccataattacccacaaatatggatgtgcccttctaagggtcttgccatgtcaaccagcccagctgaaagctaatagccagtgttagcggtttaaggaactgagcttcagaattgagagcccccagcaaaggaagttctgtttttattctccatttctactctcctcaaggagaaattaggtgtttattgttttgttttgttttttaaattcccagatcattctggcattggtcctggattcgctgcaaatgtaatttttagcaacatctattactcctgaaatattttggctcttcgtggcctgtatgattcagtagactctgaggttttccaagtacattaaggacttaaatacagaatgtcttaaaattttagggctattgatcaagagaaagcttctcgaggaataaagttctgttaggttttagccctattctgctttcaaaattcttaactggatgccgtctattttgttttctttctgtgtttataactaatttgctacttgggtttattgttttcttacttagaaactacttttttttttgttttgtaaatgcacagcacttaaaaatataaaacagttccaaacagttccaacctgttcattgtttataccttgaccatcttttctgtcttattgctgaaccatcgcttctctttctacttctcttctgggatttcatcttgctcagctaaaattctagtgtgttattctgaatattatggctggagtttcctgaccaacttcttgcatctgagtccatttcctgtgcttaaggctgctggcattccattcactgctcctagtcaaaactgaaacttctcctgctaatgagattaggccttacaacactattaatttcttcctctctatttcttgctccattgttatttctcagagatgaaaatctatttgtcattatgagattcattttggcatcacttactaaagttcccttggatttttctgttcttcatacaccctacagcttcaaactgcaacagtcatcaactggtctttgacaaattagttgtctctacacatggtttacaatattacactagctgtttaaaaataattaagcttctttctgtgttctttgctgtgggtcaggaactttacttcctttgccatgcaacacagaagttaatcacaaatgggtcctctgaaccaaataattaaaaatagagcaaagtttctgaaccaggcggttggcagaaacgtctgtacttccatctgtgcatggttaggaaaatatttcacgatatttaaatagcatcagctttgctctcttttgtgtgagagtgtgtctgtgtgtctatgcgtaattcattgctttgaaggtttgtttgactgttagataatcatataaaaaaagttactggcaaggaaacaggaaagcaaatccaggtgttttgtgcatacattctttatttaccagtctctgtgaaggagcaatgatcttgcttttgcttttctctctgactgaaagtttttgccttgttatgtgctgcagaaaactaaataacattgcattttgactttgaaatctttatgtctcttgattttccacttacaaataacctttgctaatggctttggggagctgttcgtatgtacccgaaatgctgatgaatctatttcagtttgaagtgtggcagattaggaatttctgctctctggaaaggggatttatacctggaatatgcatcaaattcacaaacactttgcgatatacgtgcagacacatgagtgactggttttgacaggaatttaatccttcaattggatttccctttgttcttgtgagtaatcagtatctcataaaatatattcagttttggctaattgtacagctatgatacaactttaagtttctaagatgtaaattactatgtgatataaagataattcccctctagcatttttcttttgtaacagcctctttttactcctgaaaagctctttattttaaggttgatttcattctactaggagaactgttgtgttagataacaactaatgcccaataaatacactgaagggagattaggaactgttaaagaaagaacacaaagcaaatgccttaatttcgttctttcagaacgtatatatttcccaaagttgtcagttcctttatgtttctaaaaacttaccaggtaggcatattcttaatactttgataataaaattaaacactgaaatcaaagctgtagattgaacatgctcacattaagtgaaattaaggagagaggaatacatttcattattaatgtatcagtgaattctggagtttagccatgaatatcagctataatcaataacagtttgagtatttaggcagtttgtaattcatgaaatttaaatcagaagggtctttaaacatctttttgtctaatctcattttgcattcaatttaattctattttttctcagcctactatatgcagagtactatgctagcagggaaaaataatgcggaataagttgtggcccatggtttcaaacagattaatctttgattactctttgatgctttttttgtattatttgagggacagtttttttttcttttttgagatggagtctcgcactgttgcctgggctggagtgcaatggcacgatctcagctcactgcaaccttttaaaaagagttaagtggatcttcctaatgattattctttgtcaatgtaagatattaggacttaatgtattttgtgaactctgagtacacctacaggtgagtggtagatatcttcatactttaaattactgctggattttgtctgtaccccgagacagaattttggtcttctcttatatatagcagttaatattaatgaggcttccctgaaagggttcctggatattcagattcttcacacttttcttataaaccattagatttgtttcctccattcatttgggcatcttctagtgacacacggagtggctcttaaaaaagtggaacttgattgctgatagttttattcaataaatcattgttaataaatatttatttgcgatcagaaacacaaggagggagtgtacacactcagaaaagcccacaatgcagggagcctgttcttctaacaataataatggctggctggcatattgaggatttaggatgtgtcagtcactgtactaatcacttaatcctcacagtaaacctacataggtcattattatctccaccttacagatgaggtaaccgggttagtagcttgcccaaggtcacagagctagtaagtggtgggactgggcttcatgcatgccattttaaccttagaccctgtgcttttaactaattatactctattgcctaccacctgtgtcattgtagaacttgcaaaattatgttcaaaaattgtttttactaaatataaaataaaatacagtaaaatagaaatacaaaagtatattcacaaaataaatgtaaattataaaaaataagggttcagtgaacactcctttaactctacacccatattttaaaattaccatcaactggatgtcctctatgtggacctccccaatcttgtcacattcttcccacctcagaaggaaccactatagaaacatgacgttttaaaatatttttaagactaggcacggtggctcacgtctgtaatcccagcactttgagaggccaaggcaggtggattatttgaggtccatagttcgagaccagcctgaccaacatggtaaaatcctgtctttactaaaatacaaaaattagcacacgcctgtggtccccgctactcaggaggctgaggcaggagaattgcttgaacctgggaggtcgaggctgcagtgagctgagattgcaccactacactccagcctgagcgacagagtgagactccatctcaaaaaagtatacatatatttttcacgaaagtacacaaaaatgcacaccagccagatcactgtttgttttctctcctttttctcttcttttttccctactttttcatctctcatccttcttccttcttttctcgcaccatcatggagaacaaagaagaactgggtcagaacaaacctttaaaaagtgaaggcgagcgttccttgcggggatgcccagtgtcatgactagtgttgggaattcttggtgagatgacaatatttttgcctcactcaaatgaggcatgcccttccaagtaaagcatgctatgttttgtagcaaacagaacacctgagaaggatgatttcatatgactgtgccaacagatctctcacaagcttgtcaggttataattcacaaatcttaactctatagtctatagacattttttttttatatggggtctcactctgtcggttgcctaggctggagtgcagtggtgagatcttggctcactgcaatctccgcctcttgggttcaagcgattctcctgcgtcagcctccggagtggctggggtttcaccatgttggccaggctggttttgaactcctgaccacaagaaatccacctaccttggcctcccaaagtgctgagattacaggcatgagccactccacccagccagtggttctttttcatttgagatggagttttgctcttgttgcccaggctggagtgcaatggcacgatcttggctcactgtaacctctccctcccggattcaagtgattctcctgcctcagcctcccaagtagctgggattacaggcatatgccaccacacccagctaattttgtatttttagtcaagatggggtttctccatgttggtcaagctggtcttgaactcccgacctcggcctcccaaagtaccgggattataggtgtgaaccaccatgcctggcctgtttcttttttttttccaagaggtcagttctcagtctgttgtccgaactggagtgcagtggcatgatcacagctttactgcagccttgaacccttgggctcaagtgatcctcctacctcagcctcccgattagctgggactgccgctgtgcaccaccacacccaactaatttttaaaatttttttgtagagacagggtcttgctatgttgccaaagcttgtctcgaactcttggcctcaagccatcctcccgcctcggcctcccaaagtgttgggattacagacatgagctgccgtgcctggctgacttgtggttcttaatagtgtggctcttaaaatagcaaacatttttgggaaccaatgtgagggcacttcataacacaatcaaaaaccattaagtggaatatgttaagataatgtaaccttgttgttgtcccttaatgctttaatgcaggctttcagcaagtagtaatacctggtatggtgggtgtaaaactcagaatgggtcccggcatggcaggaataagagaattctttcatcggttggaaaatatgtttgaataattcactacatttaaaaaataggtaaagaggcttttggttttggttgcaaattgcactcatccatggaagtttttcaagggccatacaattctgtagatggaggtggcaatttaatgcagtcttagctgtttaggatttagaactatgttacttttaatttacttccatgaaattacaaaaacatgtaatgaagctaaaaagatttcaaaagaagcacatctagtcaaacataaaagtacttaataagggcatacatgtagaagtatattagtctttgcacatatttacatatgtatgttttggttgcttaatatttttcaagtgctgcatgcatttgtatgtgtaaatacagtgtgcaccctttatagaactagtgttgggggactcttttatcagctattatgatttggagctttatcaaatggagtgatttttttttgtgtgtgtgtgagatggagtctcactctgttacccagacttgagtggagtggtgccatctcggcttattgcaacctctgcctcctgagttcaagcaattctcctgcctcagcctccaaagtagctggaattacaggcacccattagcacgcctggttaatttttgtattttcagtagagacggggtttcaccatgttggccaggctggtctcaaactcctgacctcaagtgatccacctgcctcggcctcctaaagtgctgggattacaggcgtgagccaccacacccggccggagtgatattttccaatggtcatgattctggcctgtaacaccaagcagtataacgatgagattgaagtgtgaccatgtgcgtctgcctatttttatgttctatctcatctttttgcttggagaaaaattatgttgaaagactacagtgtgcctataaagcttcaaatatgaaaaaagagctacatatgacactttgttgcagttagtccattgtctcaaaaacatgctataaaaatatgacaactagaaaagtcttggcaaatgtagcatgagtgttgccggtttaaaagccgtgtttgagtactctaaagtacttttctgtgacagctattactataggaattggcaccagctaagaaaatttacagtttaatactttagagcaaataattgcttagggtgctttaaatagcacaggaaatgtgtagagtgtttacttgacatttgctatattgaacactaatactgaaacagattctttgaccacagagaatgccagtgtaggaggggtgggggtaggtgggagaaagaggcggagaaggaaacggcaatacaattagataaaaattaaatgacaaatgtactttttcatgatacagagatatcatggggaaaaatgcccatttgtttgatcaagtaatcttctagtgtggtagcagaaagcaaagtacagacaacttcctgggattaggttcctcctgctaaaggctgtcttcaccagaaggtcaaagccttgcagcccttggtcgctctggtttatttttcaagctcctgaaagcaagaggaatgacctccgtttttattaaaaaaaaaaaaaaaaaaaaaaaaaaaaagaaaagaaaaaaaaagcctctctcgttatctgtctaatctgcacatgcttgtgatttttttttatgacgactctgatgccctcatttctcattgcagctcagtgcttgtgatgtttttttcccctgaatgcatcttgcactcccagaatcttcttttcattcttccctggctctgttaatacgggtcttatcttagaacggggtctagtgcagtttagtgtagctcttacatgcagagcattttttttttgcacaaactgcttctcgtggattgtgattcagttgcacttaaagggaaaaatagagtatattttaggctactaaacctccttccatttgtaggcatttgagccagttatacagtgtctttcagggagttttacatgcatatgttaataaccagtggcacctgtgataggtccaggaatgtgaaattgtgcaacgttaatgacatttgtccaagcttcttccttctatcttgtcaatatgagctacttttaaatacacaaaggaattttgaaaacaccaatcaaaagtcaaaatttcaccctgcagcatggcccggcacccagaacactcagcaagaggaaggtctgtatttatggcttttccactgacttgaaatttgacctggaataaatcatgtttaacttctttatgcttcaattagcttttgaaagatatgtgtggttgtgtttagccagtggaaaggcaataactgaagttcacaacgaaaggagaacttgaagggaaattttgttaggaaagaacagtgggcaagaatacaatcttcaggcagggtgctattcctaaaaagtcttggtacacatggttcctaaggaaggtgggacattttcttataatattctttctgtattttgtagaattaagaaatatattattgtacataaatattttatattacattatatatgtataaatacatttatatatatatatatatatacatactgttttaccctttaactccagaaagctttgcgttcacacatctttttccctaacttctacctataaagggatttttagtgataatcttgaatttaaattgtaatcaagcagtaacaaacttcatttaatatgcagacatctaattttataaaggaaattccaagttattgttcatttccatttattaatttatttattttgggacggagcctcactcactctgttgcccaggctggggtgcaatggcacaatctcacgtcactgtaatgtccatctcccgggttcaggtgattctcctgccccagcctcctgagtagctgtacaggcgtgcaccaccatgcccgactaatttttgtatttttagtagagattgggtttcaccgtgttggtcaggctggtcttgaactcctgacctcaagtgatctgcctgcctcagcctcccaaattgctgggattacaggcgtgcgccatcgcgcttggccaatttttgaagtttctttttttaatctgttgccatctctgagatgagaggtttttcattcatttggggaaaaaggaagaaaggtaatcaacatttattgagcacctactgtgtgccaaacagactgctaagcacttagtccttaagtaccctacgtgactgatgttcagagggccattttctctgtgtcaggaatcaggtgggagggccagaatccatagaacaaaaatataaccgttgcaatagataattaaaaagagggaccttttagttagtggcacccaaagcatcatagtgtgggctgtgagatctcagtaaaccagttgttggtaggttcccccaactcagagacctccatgagggttggatggctggattgcaacatggtgctaaaccacatctccctggttaagccatttcagttattgcctcatttaagttgcattgctgtaaaagacataggtatgacaagttgcaatgcctaaaattcgaacgaaagaatacaggctttgaatgttattcagagcttgactccggagtcccagatgcagtttcagggtgagtaaatacaaagccagcagctcccaagtttagatgagaaaacatttcaaagaaagccagcgaacgcttatatatttaacacaatatccatgactcattttctctttgctctctcagtccagccgttattcatttaccgctcaccccacaggaaagctccttttgaagtctgcctttggctactttgcaaaacatataaatatacaccttgggagaataagggtgagagagaaaaaaggcagaggtcataatttttaatcctggttctgccaataacaaactttgtgaccagatactttgtacagtaaaggaggatgtttttaaaacccattctcagttgccagagaggcaggcagtcatcattctgtaggaagacttgtttcaggatttctcagatgtctgctgtgtttggattgctgaggtccctaaagaaccttccctttgagtcagctcgactaggcttttggaagtagccctggaggtgtgatagcaccttaaaaattcttagtaactaggaataaatagaaggagaatgggaaggaatagaagctgggtgacggggaagggaatgccaagctgtcctgcagctgggatccacacttggtgaaggttgtgcctgcgtccctcatctgtggttgggtataccagaattttgatatctctctagttcgaataccagccttgacatttaccaccttggccaagtccctgaacctatctgtgcctcagtttcttcatctgaagagtggggattatagtcaatgtaaggactaagaaaatcaatatacgtaatacccctagtattcacacttcacctgctatgatgatattaccattctcctttggagttttctaacttatttgtgtagcatttagggcaaaataccaggcatatgggtgatggcgtgtagtggagttggtgagagggagaccttgagttgtagaaagggtgggcagaacctggtttctgtcctacatcccagatgttgcccatacatatcctgtttgtttctgaccaccctgctttgctgtgagggttcccagcccctctgcctttacctgtcctcattctgccccactgtccatgcccagcatgaatctccacttctccgggacggaaagttttccccagctgcttcagcccaaaccaacttccctccccactgccctgtgcgcacagcttatttgatcatgtcatttattgcttcattttgtggcttagatgtcttgcgtcccagtcagactccatgtgactggaggcctttgcctcctttcagctccagggtagtgtggcagaaagagcaaggagcagggagggaagggacctgctctcttctccagccctttctctgtgataaactcagcatgctccaggcgtttaatctctgtaatcctcacagcctcctcatgcaaaatgagggtctagaccaagtgacctctacagctgcccttgcagcttccccattttagagtagtagatggtgaataagtatggcccgaatgaatgaacaaatgtgcagtctcaagttggtcagttgtggcttaaattatttttgtgcccactggcatctcggcttggtaaatggaggaaacggtctctgacgaattttcactttcagtagacagaaattttgttaattttgatcattttatagtccgaatttgtggacacattgaattaatatttatattagtaatatgtctaagaagaaaagattttttatgctaacaaataatataaataatgtcacagactaataacagctaagagtcagtaataaaggaaatttgtttttaagcactttggaagttcctgtttgcatgcattatatgattatatatacataatttgtattacattattatataagctctcttagtctattcattaagtaatttgatgatcattttgaaatttttttataagtacttaagagagttaaaactatatttcttcttgaaacattgtaatttggacttgttttcttattcatattagatgtcttctctgagcccagttactgagtatgtagtaacttttttgtgtgttacaataattgacagagacggtggttcaaattttcagcatcaaacctcactttggaattatttatttccattttttctcttacctactagtatatatggatccaaaattaattgcttttttattatatttaatacatctatttgctttgtggttttactgatacttgaaaattgtaaacaattatgaaagattttgaactttaatcatcttaatttgcttaattaacataatttactagaggagagaaagagaaaacagacttggttacttatttatgtttgtaaccacctttgtatatgtagtaacaccagagcaggcacttcataattgaaaaggctttagggtaataagtcactgtctgtttcaaactgtgatgactttctggaaaaaatagcttttgtaatatttgtcatactggcccagatccagaaagtagtatgttcagtgtctaattgtactccatatggcctgaactcttgagcaatccatctgaagtaggaccctgttaagaaattattctttgtttttttttgagatgaagtttcgctcttgtcgcccaggctggagtgcaatggcatgatcttggctcactgcaacctccacctcccggcttcaagcgattcttctgcctcagcctcctgagtagagtagctgggattacaggcacccagctgttttttgtctttttagtagagatggagtttcaccgtgttggccaggctagtcttgaactcctgacctcaagtgatccacccgcctcggcctcccaaagtgctgggactataggtgtgagctaccgggcccggccaagaaattattctatgtcatacataattgggtgcaagaggtcttagtaatttgcattttaaaatgataattggtatcatctacgaagagaagttctaccttagtgttttagtttagcagtgacactaagatattatacatatgaaaatctcttaatgttagtgggcagaactgggaacccttccctttttttttttttttttgagacagagtcttgctctgccacccagactggagtgcagtgatgcaatcttgactcactgcagcctctgctcccccgggttccagcgattctcttgcctcagccacctgtgtagctgggattacaggcacacgccaccacgcccagctaatttttgtattttagtagagatggggttttgccatgttggccaggctggtcttgaactcctgacctcaggtgatccgcctgccttggcctcccaaagtgctgggattacaggcatgagccactgtgcccggctggaacccctccctcttacagttcacagggtataagaagctactttctagggcttcatcttaatatggtgattgagttctatattatggccaaaaggaaaattatgtgggtattgtggggaggaggagtcagagggctaggggcaaagcgggcagagaaatatcagctgcctttatttagcaaatatttaccagtcgttcctgcccatatgcacttgttccttgtgtacttggatctgaattgattaaaaaggtctgtatgtattgagtcttttcccttaggagcgcttaagctttcttttgatgctttttttctcttcctttaaaatggtgcaggaaaatgttggaataaacatagtcagcttgtgaaaggatgattctctcccttatctgggcataaatattgttgaatgtgagaatgtgggagtagctactgggccaaatatgcacaatgagtgcaagtgattattgaccttactgatgagaggaaggaagagaaatactttaaaactattttcacagggcatttcaaccaagatgtttttctaaattcggtttctgattcaaaaactggatttagctctttttcttgtttgtttcatctgaacaaatttaccctgaattgaatgggagagtgtttcttaatcccccatgtctttagcagtgagtcatttccatgttgttgagacattttctagcctttattgctgtgtgtagttcatgcttttctctggatgttttgactccttaaggaactcgcaataacaaattaacaatcacactcctctggaatgaaaacacgcagtatcggagtaataaatagcagttctcgaaacctaaataaacacagaaaactcagctctcgtacttaagaaggctctagaggagtccagtgtccaacattacaagcaagacacaccatttaaagccataggaagttaacatactttcattttaattttccaagggatcatgttataaaaccatatagccacttccattcttcaaaacttaataaacggttagttttagtcatctgacctgccttctctcaaatggatcataatttagtttaacaggtttgacattaaaataagttgtgtttctctgggaaactcatgttagcctggacttctccacttcctgtctttctctggtgaagctggtaatagtgactgagctcaggccatggcgggatcctcacagccctaagactaggtgccacctgtgtgctgcaacccagtaccaaaataacaggaaaaatctaaagttatccagataaaatatgtcaaattataaagcctctgagtcatgacagtaatcaaacctgattctatatcagcaatcaaacctgactctatatcagctttaccaaacactattaatatatcctataataaaaattaaggcgtcattcctcaggttctttagcaagtaagtcagtgcatctatctaatttgctaaggctgaaacctattgtacatagaactcgggtctgaatggttgtcccgtagaaagttttagagcagagcaaggttgtaaatagccagctccagtggctgtttttcaccctgttcatgggttgcttgccctggttgtatatttagttgcctgtgatggatggagtgaagtgcacaggtcgtctctcaggggtgaacactgggtttgattagaggccattgtcatgaaagatactccagctcttccatgaccatacatgcttagaagaaaactttgatgcacaaagaactgaaagccctaggcactggaattcctgctcatcaaaaagacacctaaaaaattcttttggagacttcatgaattttctctcgattcatactgaaggactggtgccagtaatatttttcctctttgcctgtttcagtttctcatgaagtttttccatatttagacacactgcccagttaaagggaatgccagtcactcggggtttaagacaatgaagtatgtacttccctcaccaatcagttgggagagctgattgggctgaacttccagtctgaggcatgtgagtcacacacaggcagagatttaaatgttattaacatgagaaagatcttttgaacgtgaagtcatcatgcttgaggttactttgaactttcctcatagtctcttttatgatttgtgtaagaatcaacatgctttagtcttatgttaaaaaaacacagtcgagtgaaaatggacatgaatttaaaattgcatgatagccagaaacttttcatactgtggaaatgttacactgtgataaacatttagtgaagctgcttggctcatgggctatttttttaatggcttttgggttcagaaatttcaaaatgtcagattctttgtaatttaaatttccttctaagtaaggaagtgcactatgttattaattttaaaaatatatatacttagaagttgaaattgtgtaattatcttaatgctccagagtctcttttctgactaaacattggaacttattctgttgaatgcagggaatttgtccagaaaagcttaaggaaatttagcctacgaggggaaatgcgctagattcataaataaaaggtttatccaaaggggtgatatagaacatgattttatctataaaagattgtacttgagttttgtctcttcctcctccttttaggattaagtaatgattgtagcttagtttttatagttgatttatagtaataagttatgtgtaagctgactgtgggtagttgaactcatttcaactgcagaaggatagattgttgtttaaaggatcatacaaaaattattattttttaataaaatgaaaatgtccccagagatgttacacctggaaacttaaaagtaggaaaaatgataatatagtatgttactctatctctggaaggaatgatctctcccactgaaaagtaaatagtccaaagtttacaatgtttagttgaaatagcttataaatcacggcagtgacttttaatccttagtagaattctcctttatttctgagaagtctgtataaatgtttatggaaacacagtctgaaatattttaaatgtagcataccaatagtacttaaagagaactttacgcatgatcacacacattcagagttgttgggtaaaaacaccttgtaccttctttggtagaaaatacttctgtatttgcgtgtgtgtgagagagagtgtgtgtgtgttttaaattcttaaacataacagatcttttgaagcagagcagaaaactcgcatgttactgacactgcattctcagccatggggaaagcaacagtgtgtttcagctttagcaaattacatgtgttgactcactaaagaacctgagtaactacacctcagtttttattacaggaaatattaatagtgttttgtaaagccaatagagactcaggtttgattactatcatgactcagagactttataatttgacatattttctctggataattgtagatgtttcctgttattttggattttttattatcgttatttactgtgagttttgcgctcatatacatgtagcccagaaaagcgatagtgagatggttcagtgtatggaatcagttttattgaacaaacagtggggcaggtggggggagatacttttttgtaattagactattattagtgagcacttcctttggcttttgttcatttaaatgtatcttttctttataacttcacaggacgtggaacatgtaaatgcattttgagttgaaagcagaaaatcacatttcagtaaaattaaaagctcaagatttcattttcttgtaaaatttctaatcatccccatttgctgaactttgggccctttcttggcattgggaggtcatggctaatgaatgcatctcctgttgcctggcttacagccgccccctgctgcagtgccatttgggagaagtgtgtaatgtgcgtgcttggactcgttatctcctttcatttcctcaacatcagttaatgctgcatagtttgcaacatgatattgctttgagttggtgcctaattgtgtaggctggctagaagaacgaatctttgcagtggtcaggtgaggccactgagtgtgcccctttgcggccactgcaataaggtggttgggaattcttcatttctgatcactgaacttttccagaacgtcccaaggctcccccaggaactgtattacagcatgacattctgtgtatgtgggtttttctgggagaggattgtagctttcaatcagatcctccaagaattctgtttctcaaaaggttcataggaaccatttatttagaattgaaagataggcacatcttctgaggaaaacaaatgaaaggcttaacaaaatgttaaggctgagttacagaaaacaagccataagctacctattttattcaattaaaaataaccatgacatggccattttgtaaattattacattaaatctgcattgcagacatacctggtacgtatttatttatttattttttaagaggcagggtctccctctatcaccctggctggagtgcagtggcatgatcatagctcactgcagcctcaaatacccgggctcaagcagtcctcttgttccagcctcccgaatatctagaactacaaggacgtgccaccatagctggctcattttcaaattttttgtagagacgaggtctcactatgttgcccaggctggtctcgaactccctggcctcaagcagtcctcccacctcagcctcccaaagtgctgggattataggcatgaacaaccacccccagccacttggtacatatttcaaatgtggtttgtttcttttgaaataatgaaaaggaataatgtttcagggtttgtggcatccacattttgggatggctacatgccgtaaccttgttcgtagtagctcctgatttttatctgtattagaaattgctcggcatgagacaaatgaggaacatttggggaaatgtgtgagtaattgagtaaaaactaatagctgtcttaagggaaccatcttctggtttgcatttgtattaataggtatgcagagcaggaataatttggaacgggggagctggttatcctctgggtgtgtcaagcacaaatctcagattccattacatctgcacaagtcttgacagtttgcaaaatgtgcctagaggtatgcttgataaggacagacatttcttgcctgggttctaactgtgtcactgctagcacagtatctggcctgaacagcatctaaagaaatattttgctggatgggttacctcaatgggttctcatagcagccctgtggatatagacacagcatgttttatcattcttttctacaggctcaaagagggtaattacttactcaggctcacatagctggtaggaaaaggatttaggcctctcctttataccatgctttagctcgacccaaataataaaagcaaaaaagccatgtttggatcaactgagttttaatagaagagcattggagagaggttgtaaaccctcagatattttcaaaaataatagtaagcattcttgacttgcaatgcagagaatgtcttaagctcatatgtcttgatggtgctaatcaagtcaggcttttataattgagtgaaagcacagaaaaataatttattcattcttatacaaccaagtatttattgaatgtcttttctgcaccagacatggttgtatgcactgaggacgtaacagagaacaaacaaggttgtctaagtccctgccctcagagagcttatgttctcatagtggagacaaccacaagtaaattgcataagtagactctatttgcagaccccccaaaatagagtaggatatgttaggagaaagagtgatggcaggggcgaaggggattcttttgtttggtggagtcagggaaagtcttaggggatgggcttttgtacagagactgcagtaaggtataggagccagccctggaagatgggagtggtgaagggtgagatgagaatctgaggatgagcactgtaaaggaagagaatggccaggtgaaggctctgaggccagaaggagcctttgaattgatctagaggctgcaggagcttggattttacgctaaatgtgatgggaaactctgttagttttccagggctgctctaataaattaccagaaacttggtgggttaaaacaacaggaatttgttctctcaaagttctggagggcagacgtctgaaatcaggtgtcagccgggccacactccctcccgaagctctgttgggagaacctttccttgccgctgtcatcctctggtggttccaggcgttccttggcttgtggcagcgtcactccagtctctgcctctgttttcacatggccttctcctctgtgtctgtaccaggtcctctcctgtctcttagaagaacagtggtcattggatttaggacccacccgggaaatccatgacatttatgtcaggggctggaaaaggaaggacaggtgggatgtgaccatccggagagcctatctcagctgtcatgggttgtcacaaaggccattgtgtggttaatttttatcttcttattcttgtttcctctttaatctttcattctaagccctatagccctgactggcagattcgctgtcgggtttttctagttgtagatgacatgctttttcttaaagccatcttcatttattaatctacattcgtttttaattttaatgcaccaatcaataattatttcacttgacagtttttgacagcatgctgcttgcgacatttagctgtttagcatgaattcaaaaggtgatctatcaatttgcacaaatgaaataaagttgctctttcttcctgtgctttgggggaatgtataaaaaaatgtatgtttatccttccctggagaatttttgatgtagaaatactgaatagttttctatataagaagacagaggactaaagagctttaaaatttgttgtgcttattttgcttgtatcataaattcacgtgaaaggccagatttctcttaattgcgttgatattgtggagatgaatcattcaacaaatgtttattaagtgctcattgtgtgcatggcactctgcaaatgttatgggaaataaagacagagtccccgggaaataaagacagagtccccaggaagtctagtagtcagagaaacaaagccacttcccaaattatggtgggtagaaaaacttaggaaatgacagttttatcatgctacataccttcacttaatgaatcctatgtgaaaattcccagtaaaaacctatgaacaaaagtgtgtggttgtcttcatgtatacattgtgtgcacacatctgtgcgtacaatgcacagctttgtatgaagctagctgaaaactaaacagctaggctgaacttagctgaaaactaaacagcaggggaaatgttctttctcactaaaatcacagtgttaaaactcttggcagttcagatggtctccactgtagctgttggtttacattttgataatttaccaaagagcataatatatttaattcctagttggatggtgtaactcaacacagcatttccagcgaaacgctttgcaaatgggaagtaagcattttctttggaaaccagcagcttccttactcccttggttcttctgtgggtataagcatgacctataggttagaagttctggaacagaaggagaaaaatgaattatgtcacagttaacaggaaaggaggtgctttgcattcttgctccgttgcagttagttttgttttccttccttggtttgggggcatttggccttgcatatcctggcaagatttaggcaaaacaggcactgaccttctttctggaatgctctttcattttgccccatgcatattattaagaggcataattcactgtcatatttttgtggctaaaagttttctaacttctatacactgagcctttgttttctgcttaatagggcaaaagagctggcattttctgggcatcattgacccttcactatgatttagattttttaaagaaacacataaactgttcattgcaccttgttgtgtggcaactctgccagtcactaattggtactgtggatatttggctgttgctcttatttactttcctctggtttttacatcacttaattaaatcttgtgccagtttccattctatacatgtatagggaagcaaacagaaactttgtcctgaagcaccaggttctttggcttcatcatcctaaacagctctgtgaaaatcagttgaaagtgagtagagccagaagtggcgtgtaagccatgctgtcagcgagggctggctggatctgcatacgatcgccgccttctgcccctgcttttggagactagagatggcttctggtctgtgtccagggcttgccatgctgattcagagagctatgccacagatgagcctgagttgagaccatgatgccagcatatcctcagacccacgagatcgttatgccagaatgttaatccgcagtggaaaccattactaacatactctcaaggcccacatgatgagcacattctctctctgtgttaagctgcatgggaatgtaaatcctaactggaagctactttattgatgtgccttgagaaattgctgctctctggctgcaggtatcagcagcagtcacagtgcacatgctctctaaggaagatccatatggagtcaggtgtttgcttggtgagcagggaatcggaacaagggagtgggatgagttgactgttaagtggcaccaagcaaacatagcctgcctctctgttcatctcaggagaagggtggcttttctagtgggaccaggaacatgtcagtcattgcctgctactccctacagtcatctcactagggtggccttgcctgtgaagacactgtattctccccaacaaccttggcattgcctacatagactttagtgactctgtactttcctggctaagccagccctggcgcccttttgaggacacagtcttttcttaaattcatgactatatttcatcaggtgctggctggggcaggggtagtggtgatggtagtaattatctttcttcagttggctttgtatgtccatgttctcatccactaaattttgttcttactataaaccgctaactaggcaatctcttccccgttgtcaagttcttggttggggaatggtaatctttattgtccttcttataagtccctttggaatggatagaggctttgggatggacatctcgtgaactgtatcttcatatcaagctctgtgaactgaatggcaacaaggaggcattcatccagaccaggagtaggcaaactatggtccatgggccaaatccagcctgttcttgtaaataaagttttattagcacatagctacatccaataatttgtctaatgtctatagcagtttttgcactacactggcagaatttgatttgagtcatggtgaaagagaccatagtccaagaaagcctgaaatatctactatctgatcctcatcagaaaatgtttgccaactgtagtctatacctttgcacgtcagagaattgcatcagggaagaactagaagccctccttttgcacccccacaaccctgccacaattcagtgaacaaacagaagatcagagagggaatgtgacttgaccaaagtcacacagctggttcataggaaagccaggacctgagctcagatcttccagttcctagtgtatttgtcttctacttttggaggacgttgtgagttttctggtttacagatgattaaccattacaacatactgaaagaaagcttctttagtggtcagagctattttccaaactgacttccccaggcaaaatcactagccagcttggcattgatactcatttattaatcttacaaacagtacctaccatatttcagggatggggctggggctaagacactgatgaagaagcacaatccctgcccttgggaagtttggatgagaagagtggtcagatagctagatacagagatgcatgtcattttatctgtagtgtgttacttatcatcataggactgtgatcatatggacgaaggatgcgttaatttagccttgagtgggtgggggtgttgtcaggaatggctccatagggttggagatgtttgagctctgtctcaaaggagattgagttcttcaggtagagaattgcagcagaaatggctgtggtcctctaggcttgagtgtgcatggtatccagtaatttgggaatgcttgtctaacacaactagaggtagggcttaggggacgtggtatggggttacaggaaatctagttggaaaagtaagttggagccaaactgggaaacttacggcatttcaaatgctaaggagtatggactttggcttatattctaggggttttctaatctgtagattccaaaacatatgggagaccacatttcttgtaaaagaggacctgcacattcataccaacacaaagcatggtctgtagatttggtcatcagaatcactaacagaaataggagctttcttccaaatatatgtagctggctgatattgtaagtcattagccagaattcattcacagcgttactaagttcatagtatctttttgaccattgtacatcttcttgatcaacagatattaagagttaaacatctagtgcctgaagtctgcaacatttttgattgaagaaaatgttgggaaccactgccgttgatggcagtagtcatgaaattttttgaattaacacatgttataggttccagagtcagctgccctaaattttactagctttgtgactttgagcaagttatttaacatacctcagctgtaagagtctttatctctaacgttaaaataatagcctctgtctcttaagattgttataaagatatgataatgtctgaacgcatgtagcatggggccaggctgatgggatatactcatgtttaaatagaagctattgtaatgatttttagcggatgtggcatatgcagatgtattttagatttgacccagtgtggacgatgagttcaaaagggagagttgtacgaccttcctgttatccaagtgagaaataatggggccagggtgggcaggggataggttagggaaggagaggggagagggagtatgggaaggtgtatgtccactttaggtaatgaagtgagaaatgaaagaagccacattctgtttcatgcccaaagcaacagacaaggcacaaattagagtgtagggaagccagtttctgtgacttgatggcatagaatggtgtggcttatctggcaaattccacgccccgtaactcctggaattgatctggataagaattcaccttgagtaaattttaaaaattaatttaataaattaatagccccccctttgaaacacagaaaaattagaattacagcatgagtatctttttttgctctaaaacagtacagcccagcagttcagcctacacccatcacagagctttcaaaggaatgtatacaagaaaatacatatacaattacaaattttaaaaattaagtaacatgtatatactgttaaatatttatatattgatgcttagaaaaagatgggacaaatgttaagtgtcagctgggaggtttttactttcttctttgccatttctgtatttttcaaaatgaatatgtatataattttaaaatgtgttaacactatttcaaaaggaaaacaatcacaaaaaggaatagattggaaaagcttcaggggacttgctatccttgtctttttgggtagctgttctacaaaggcgggtggtggtgggtgcctcccagctgtgtctcatttcagtcagcggatgctctgctaaatctagtgatgggcggcctacctccgaaaggtgggtgggagtgagggatgagtgtagcagtagtacatgcaaatggggccaggttttggtgtgtgtgtgtgtgtgtgtgtgtgtgtgtgtgtgtgtgtgtgtggtgtgtggttttttttttctttctttttttctacagtcttactctgtcgcccaggctggcatggagtggtgtgatcttggctcactgcaacctccgcctcctgggttcaagtgattctctgcctcaacctcccaagtagctgggactagaggtgcacaccaccacgcctggctaatttttgtatttttataaagacgagatttcacatgttggccaggctggtctcaaacttctggcctcatgtgatccacccgctttggcctcccaaagtactgggattataggcatgagttactacgcgcggccagggaccagttaagatttgacgattacattttattgaatgtttgcatcagaggcacctggaaggcttgtttagaccacagatttctgggcgccaggcccaggggttctgatttaatagttctagggtggagcctgagaatatgtatttctgacaaatccctccgtgaaactgatgctgctggccccaggaccacactttaagtgaggggtagtaagcgggtggagaactgcatggaggatgaaaagcatccagttggattttatatttgctcccccttcttcatatacacacactgaaatcactccactctatgttttctcagattctttccctgtctggaatatttggttctctcttcatgttcagtcagtagaaacaagaagtaactcttggattgagcagttttcacacaagtagcccaaatgatattgacacatcatttctacacagcatcagcttgttcacacacatacgcccccagaggccaatggcgtcctttggctttgttctcctttttaaaaattcagtgagtaagctaattttataggaatgtctcagaaagctattcctgtaaacccagcgtttgtaaattgaaatagaggaagcggtgctgattaccgcaattgtattgaaacttattcatggagcggtccctctagattcagatagtttggacagaaaccctccaactcttcccttaccactccattgtttggtaaagtttaatgtgctcacatggcatctactttttcagccagggttaatactcctagcgattctttcactggaagggatgactcagagaggaagagttggcattaattgcttcatcaactatgcttattatgagtcatctcttgcttgtcttagtaattcagctggaaaaaggagaaatgttatctctggttcctgaggccagcttgggcttcagtgaactaggatactccctcgtagccatttgtgagtttcattcagttactaagggaatgaacagattgtgaatctcattatcctagcaggtacatataaatctataaatggcgaatggcagttacttcctgatgtttatcagtgatgagatgccacaggcaggacgttagccctagaaaggcactgttttgaaggtggctgattaaggggcaaaagaaaaaaaaaaaaagcaaaaacggagggatatgttcaggtccctgcctttactcagttccctcccctagcttccaatttgattaacagaggtgtcgagggaggaagagaacaatttccaaataaaactgcctttggttctttttttgagtgtaatgtggtaactggattatttggaaacacgaatttaggtctcttactttctacttcttgcgttcagttcactcgtgtcttcctgtttggtgtataccttccccttctgactcagtcttctctatttctcttctcactgtagcagaccaccgttcttcccctgccttaggcgtttctcacttgctgtctgccttgcgtggctgttttcactcaagcatgttcactgttcctttgtacggaataggggttatccccacagaccctccaggtagaaagtacatctttcttttcactaataaattagtttattattaatagtgaaaagaaagtacatctttcttttcactaataaattagtttctatttagggagaacatacagtgaaatcaacacatcttaagcgtacagcgcaatgagttttgatgaatgcatacatccacataatcagcatcctaatcaagatatgggacatttccatcaccccagagcccctctgcccccttcctgtcaactttccacctccccgtcatcaaccactgctttgatttctgtcactgtaattgaattttgtttgttcttgagcttcatacaaatggaatcagtcagtactttttcgtatctgctttcttttgttcagcatatcatttttgagatcatctgtattgttgcaggtagcaacagttaatttaaaaaatgctagccagaggccaaggcaggcatattgcttgagtctagaagttcgagatcagcctgggcaacatggtgaaaccctgtctctattaaaaatacaaaaactaggcggcagcagtggcacgcacctgtaatcccagatactcaggaggctgaggtgggaggatcacttgagcctgggaggggtcaagcctgcagtgagtcatgatggtgccactgcacttccagcctgggcaacagaatgatgtgtcgcaaaacaaacaatctatatctatatagatatagatggtttttttttttattttgtgaacttacatatatgtgtgtatatatatatgtgtatatatatgtgtatatatatgagttctttatatagtctggatttaagtcatttatcagaaatatgaattttttctcagtgtttggcttacctttttcattttttaaactgtgtttgatgagcccctttaaattttaatgaagtctaatttatcattttttaagatatatgctttttgtgtctttataacatttttgcttaccctgtggttgctaagatgttatcctcctgttttctcctggaagatttctagtttagccttaacatttaagtatatgagccatttcaaattaagatatgaggtgtaggggtcaagattcagtttttattaaaatgtatgaaacaacaattattgaagtgattttttttccttatgaaattgccatcacacctttgtcaaaaatcatttggttttatatgtgttttaagactctctgttccactgatctgcagtctgtacttaggtcaatactatattgtcttgattaaaatactgtcatgggctgggctctatggctcttgcctgtaatcccagcaccttgggaggctgaggtgggaggatcgcttgggcccaggagtttgaggctacagtgactgcagcattgcattccatcctgggcagcagagtgagaccgtgtctctattaaaaataataataataggctgggtgtggtggctcatgcctgtaatcccagtactttgggaggccgaggcagaaagattgcttgagctcaggagtttgagaccagcctgggcagcatagcaaaaccccatctctactaaaaatacaaaaatcagctgggtgaggtggcatgtgcctgtagtcccatctactggtgaggctgaggtgggaggatcgcttgagcccaggaggttgaggctacagtgagctgtgatcatgccactgcactccggcctgggtgactgagctggaccctgtctcaaaaataataacaataaaattcaaaaataatgaataaatgttaaaattaaaaactaaatagctttatggtaaatcttgaaaacagatagcgtgagtcctctctgtcttgttttttccctcaagattattttggtggtgttctatctccttcagagttccatataaatccccctaccccccaaaaaagcctgttagaagttagttcagattgcactgaatcataagagagaaatttaaggaaaattcaccttaacaatattgaaacttcaattcaaaaacacggtatatctttctctgcctttttaatgaatttctgccaggaatgtttccctgtttttcctgcagagacattgcatatctttggtaaaatttaattgtactttatgcttttcgatataatacatgtaatttttaaatcatccttttcaaattatttatataaccaggactttttttctgatcgtacagggaaagtattaactatttcaccactatttcatcatgatgttagctgtaggtttttcatttgccttttattggattgacgaagtttccttctattctcttttttctaagaatttgtgtttgtttgtttttatcgggaatgtgtgttgaattttgtgcagttcatttttgcctctgttgagatgtcatatggttttccgctttatgtggtgaattatattgattggttttaagtgttaaaccaaacttgagttcctgggataagaaccagttataattatgtgttattttgacctattgctggatattttggctaacattttattaagtatttttgcgactatgtttattaagaacattggtctgtaattttgtttctttatataatatttactagggtttagtgttagtgttagtaatactgattatataaaatgtattcgtggagtcctcctgttttttactattttctgaaagaatttatgtaagattttctttcctcttaaaattgatgaaattccacagtgaaatctttgggcttggagttctctttgtgtgaaggttctaagtttttaaaatttaatttaaaaacattataaagtaaaatattcccttttttgatgtacaattctatgcattttaacatgtgtagagttgcataactaccaccacaatcaggatacagaacagttgtatcatcattgtgccaaggattttgatactgaattcaatttcttaacatatagccaactcttcagattttctgtttattcttgctattggtaagttatgctttctatttttcaagaagttttttatttcatccaagttgtgagatttattgacataaagtttttagtaatactttcttcttatctatttagtgtctgtaggatttatagtgatatccccttttccatttttaatgatgttttcatttacttatttttgtgattagttttgctagatgttaattaattttattaagctcttcaaagaatgaactactgtttgctttctgttcttctcattatttccttctttttccctactttggatttaattttccttcctccttcctttctctttttcttttcttttctttttttttttttgagacagagtttcgctctttcacccaggctggagttcagtggcacaatcttggctcactgcaaactctgttccctgggttcaagtgattctcctgcctcagcctcccaagtagctgggattacaggcatgcaccaccgtgcccagctaatttttgtatttttagtagagacagggtttcgccacgttggccaggctggtcttgaactcctgacctcaggtgttccacctgccttggcctcccaaagtgctaggattataggcatgagacaccgtgcctggcttgctttcctttctctatatcactgatttgaacgtcttctttttttttctgttcctaggtacacacacttttaagattgatgtatcttcctaataagtacaccctttaattattatgaaatgaccctttaactctggcaattctccttgtctagaaatctactgatctgaatatggctacaagagctgcaggctgttcagacttcagccgaggtcttgcaatgagcccttatgttttaattgcattgtacaaattttgatatatacttttattgtcacttaactcagtattttgtatttccattttatttcctctgggaattgtctagtagtaaacattttaattcacagacgtggggaatttttaagcttcccttttttccttaattgctaattacatttttatttatttatttctcttcatagttgttgctttaaatatctctgtgccattttgttagatgcatgtatgttgacgattataaaatcatctttattggttgttccttttgccagcctaggatgtccctcaccatcatttataatgcttttaaccttacattccattttgtctgatattcagagtgctatcctggtttttgtttttagttttgcttatattttcttttttaaaaatcttttagttttaatgtcattgtatatgttcattttacacgcatcattcttcccccccaccacatattgtgcatagctctgtacttgtctctgttatttgattagtgactttatacccagttatccttactgtaatcatttttattaagatttttagcttcatttaatgttttctacttggctttactttttgttttgttttgttttgctttcttcctttggatagatcggattttttttcccgaacacattttattttattcttgtagcatttatacctttatttaaacataaacttaggtataaacatagtttcctttatgtctaaaaattatcagtaatttttaagttccccaaatgactcccccactcataaccattggacctcttctctctcagtctgctattttccccagtgttccctctactgagacttaaccaccttctttcctgcaagaattccccatcacatggaaaataactctcagctgcatcaacctctagcctgtgcaacttccccaccttgcttggaaccggaaatgacttctacttttagaaagttcattctctgggcagagtagaagatagaattcattggggtgttattgagacagagagaccatctaggtactcttgaagaagtccaggagactttaggagggtccaggttagagtagtggcagtagagtgggaggactggtggaacaaccgggaggatttggtgttgtatttgaggagtttgagaaaaagagaagttgatggtgccaagtatgagtggcaaatatcagatttcttttattttttcctaccctattctcttccctcccaaattccatttgcatgacttcttaccaaggtttggttctgccattttaaatgaaataagacatgtaaaacacatggtatatgtcctagtatagaaatagtaattaaaaaaaatagatgctagcttccacatttctgtctcaagtgctgactgtatgaatggggaggaggagcctacagattcctgaggaggaacaacttctttttcttggtggcagggtggttagaaatgtaattatttcatttcttcatcttttgaatttgagctgccaatgagacatttaggtgacagaaaattgtatatctaagtctaggattgaaaagagatgatagagattcaatagctgttaggaaaactgtagaagctcgtctagcgggaggtgataaagtgaagagaagagaaatttgaaaagcatttatgggatggattggaagaaggaggatccatcagagaaagttaggaggcctgaattcttgtcccagtctggtttatttagccctgaataaagcacttaaccctctcagggtcctctttctttcttcctttttttttttttttttgagatggagtcttgctctgtcgcccaggctggagcgcaatggtgcaatctcggctccctgcaacttccgcctctgggttcaagcaattctcctgcctcagtctcctgagtagctaggattacaagtgtgcactaccacgcacggaccatttttttgtgtttttagtagagacagggtttcaccttgttggtcaggatggtcttgaactcctgacctcgtgatccacttgcctcggcctcccaaagtgctgggattacaggcataagccactgtgcccggccctctcttcctttaagatctctttctttctctctgcctctcgttctctttctccattcttcattaattcaacaaagatttcttgcatacgtattgggcgccaaattctgctctaggtattgaggctaaagcataagataggatgtggtctttgacctctagtactgggagcaggcaacagattaatcattgctctctgttaagcattatggtagggtatgtttcatacctgagtcaggttgactggaggaaagggtgctgagaaggcctgcagagcacgtccttcagtccaagcttttcagaatgaggagttgttcagacaagcttgggcaaagaaagacaaaagaagtgcaaaatagtattatatggatgggctgaaggagcaataagcagtttggtaggtccatagtgaggcaggcctgacaccgctagaggggctcagggtctcgatcaggaagggcccttgtgagccaagcagagatcttggattttatcttggatgcaatgtagacccattcaaggactgtagggatgtgaaaagtcaggtgtgtgtttcagtgatttcattctgttagtgctatgcatttggcatgataagggaccaggtggtgggcaaggagaccagagaggaagcagttgtagaaatccaggtgacagaggaatgttgaaaattccagaaccacagagcacctgcttcatgctaatcacaggtctgtgtgctgcggcttctgcagggaccaggacagacaggccccttgttctcatggagtttggagtggcaatggaagtgacagaatggaaagaatgagcagattggagagatgttaataagcaaggatttagaggacttgatgagcaattagatattggaagtgaatgagaggggggtagtgtctggtttgaggaagtgaatgggcaaatgacaccactcactgtgattggggaaccaagagaataactgagtgggaccttcagggaaaggtgcccagcctgcacttgtataaataggtctggatctcaggaacggcctccgtgacttactggatcagggaaagaattggactatgtggatgtttacgttacttgattttattctgctccatcattcagtttgggtctgtgactgttgagtcacctcacagaggacgaggtatccttatatctctttccctaaaacctagtgtggggtgagcaaaacagtagggctattgtttgaagtaggtctggaattctgtatcattaatttctttgctcaccctctgatccctgccttcactttagccctcccccaagtcccagcataggctcactacctggattttggcttctgtgtgaactgctgtgggcaatcgtgtcatattcctgtcacagagactctaggatgctccagcgggtagggattttaggatcactgggtccaatctctgcaattacagatgagagaggtgaggcctgaggaggcaagggggcctgcagagcactggtgtagggctacagtgtggtcgcttgattcactggtctgttttgcactgtgccccctccccctcgctgagtgcttagagagcagggcaggaaaagttctgcacattggtgcagacgtttggaaatgactaagcctgtgtgtgtaactttgagacttctcgtgaaggttgtcaagaagcatttgatcacttcagctctgaggtagggagacagtctccttgggcatcacacttgcattccagcagcccccttgtttggggtgctctccaaaggctccccgtaaggaattgtttcaccccgggtgtagaatcacattgcactgcggcttcaaaggaaaagtaaaaaagtgcagaaattaccgaccggagtgtgggaagtacttcttgttggtaagattttcaagtgctggggaagagatgtgttgaaaggacatttactttcatcagcttagagcatctgttttttatactttaaaaagaagcaacacctcaaattatggcagtccctgggcaagtaagcacttgagattttgatctgtacagattcttagagggagcgcctcgcaggagctgttagtagtgatttgtagcacttaactgattctgtagaccgacagtcaatcttggggggaaagggggttcagaggcaatgatagttaaggaactgctccgtaaaacagcaaataagccattgctcttgcacccgagtagaaatggaaactgtacttagcaggctctggagaccaaattagataggaaatgaaaataaattccatgttttttatttttaactcagtgcgcacctccaaaacattcgtacagtgtgggctccatgacgtgttttgcctgctctcttatacagatttaagtttttaaatggtagttagagacactcaacataaaagctgctgctttaaccgttgttgttattgctttgtttttttgagatggaatctcgctcttgttgcctgcactggagtgcagtggtgtgatctcagctcactgcaacctccaccccccaggttcaagcaattctcctggctcaggctcccgggtagctgggattacaggcgtgcgccatcacacccagctagttttgtatttttagtagagacggggtttcactatgttggccagattggtctcgaactcctgacctcaggtgatccacccgcctcggcctcccaaagtgccgggattacagtcgtgagccactgtgcccaacccactttaaccatttttaaatatgcatttcagtggcattaagtacattcaccatagatgtactatttattataggcacagtttcctaaactgagtaaagaaaggaaacatttacccccacagcccagtatagtcattgttaaaattaagatgttagtctccaagtcttttgtttacatgattttgttcaaacctagttgcaatacttttcatagaggttataaagagaaatatagagttataaaggaatttttttaaaattatactttaagttttagggtagatgtgcacaacttgcaggtttgttacatatgtatacatgtgccatgttgttgtactgcacccattaaatcgtcatttacattaggtatatctcctaatgctatccctcccccttccccccaccccacaacaggccctggggtgtggtgttccccttcctgtgcccaagtgttctcattgttcaattcccacctatgagtgagaacatgcggtgtttggttttttgtccttgcgatagtttgctgagaatgatggtttccagcttcatccatgtccctacaaaggacatgaactcatcattttttatggctgcatagtattccctggtgtgtatgtgccacattttcttaatgcagtttatcattgttggacatttgggttggttccaagtctttgctattgtgaatagtgccgcaataaacatacgtgtgcatgtgtctttatagcagcatgatttatactccttttggtatatacccagtaatgggatggctgggtcaaatggtatttctagttctagatccctgaggaatcgccacactgacttccacaatggttgaactagtttacagtcccacaaacagtgtaaaaatgttcctatgtctccacatcctctccagcacctgttgtttcctgactttttaatgattgccattctaactggtgtgagatggtatgtcattgtggttttgatttgcatttctctgatggccagtgatgatgagcattttttgtcttttggctgcataaatgtcttcttttgagaagtgtctattcatatccttcgcccactttttgatggggttgtttgtttttttcttgtaaatttgtttgagttctttgtagattctggatattagccctttgtccgatgagtagattgcaaaaattttctcccattctgtaggttgcctgttcactccgatggtagtttctttggctgtgcagaagctctttagtttaattagatcccatttgacaattttggcttttgttgccattgcttttggtgttttagacatgaagtcgttgcccatgcctatgtcctgaatggtattgcctaggttttcttctagggtttttatggttttaggtctaacatttaagtctttaatccatcttgaattaatttttgtataaggtgtaaggaaggggttcagtttcggctttctacatatggctagccagttttcccagcaccatttattaaatagggaatcctttccccatttcttgtttttgtcaggtttgtcaaagatcggatagttgtagatgtgtggcattatttctgagggctctgttctgttccattggtctatatctctgttttggtaccagtaccatgctgttttgattactgtagccttgtagtatagtttgaagtcaggtagtgtgatgcctccagctttgttcttttggcttaggattgacttggcaatgtgggctcttttttggttccatatgaactttaaagtagttttttccaattctgtgaagaaagtcattggtagcttgatggggatggcattgaatctataaattaccttgggcagtatggccattttgacgatattgcttcttcctttccatgagcatggaatgttcttccatttgtttgtatcctcttttatttcgttgagcagtggtttgtagttctccttgaaggggttcttcacatcccttgtaagttggattcctaggtattttattctctttgaagcagttgtgaataggaggtcactcatgatttggctctctgtttgtctgttagtggtgtataagaatgcttgtgatttttgcacattgattttgtatcctcagactttgctgacgttgcttatcagcttaaggagatttgggctgagacaatggggttttctagatatatgatcatgtcatctgcaaacagggacaatttgacttcctcttttcctaattgaatactctttatttccttctcctgcctgattgccctggccagaacttccaacactatgttgaataggagtggtgagagagggcatccctgtcttgtgtgtaaaggaatttaaagacagcctactccttctccccttctctgccccgtttatagatgaagaagtgaatggccaaaagggttaatggcttgcttagctggacagtggccatgcttgtcccagagcataggtgctccatcgcctgagcgccattccctgggctagtctgttgttagtttcaacatgtgtcataaaaaattcattggtggtttatttttagggtaatcttcttttttcctctgtctctttctttgtgtagtttctgtatctaaacttttttaatggcatcttcaaataggaacttgttttaaaccagaacgtcacaacacgtatgccattcctagggtttatcaccctgatgccaacatcccctcccaaacctcgcttctgttcagatattaccatacccaggaggtcgctgctttttgttttttttttttccatttgttttgctggttcacggttcattccagagtttaaaggtgctaaaaccaaagtttaaaggtgatagtaattgtcccatgttgggtttttagctggtttctttttcttcttaagatctgttttccacttagaaatgaggtgaaaactcacagaagcaaagcctagcagctaaaagcagcacgtctgcttaccacgttacaccctccgggctgatctgcagcccagatcccctttccatcctctacctagctcctcaattcccatcggtgagcagttttcacctcctcctgcccacgtttggaggtctgtgggtggcggttaggaagccaaaggaggctgaagctggggtatattgtttgggtcggccatggcaaccgcggcaggaaaaggaacaggactagttttgtgctgctctgtaaatggccaggattcagcagctatctcaggacttctgcttggccccagacaatctgatctcctggtaaggttattaaacttggctctcctcttccaccctcctttgatcatgttgtcaggcagcgagtaggaatggccgtaaggggtcggctggtgggggttgcagagcacagcaagatatgcaccagcagaaacataagaacaggggcagaggcaaatcagggactgtgttcttatcttttctgcaccccagatgcagagaagtacatccccaagtccttgccaatactattcttcaagagttgagcaccttgctccaaagagcctgtccagatcgccagtttgaccagcatggaggagaacaaggaagggccggtcctggaagaccccaggatttttttaattgggaaagcattatttgagttttctctgctgcaaagcacaaactgcctaccacatgtgtttcataaaaatgtcactgaaaaggagagtgagaatacagagtaagcttccatggcttaataatagtttattttgtgacttggaatagcttttcttttcattcagcggatcattttaggtgtcattcagtttattttaagtagtgtgtttcatcctgagcggattaagaattttattttttaaaactctgtactgtgttgcttcctactgggaaatttacattaaaaaaatgttcgtgagcaaaatctatttggtcaaaaagaatggcccacgattatcactgaatttgggatgtttttcttctaagggacacagttgattcttactcagaatcatgcgagtctgacatttcatttggggaagtctgaggaagttggtgaggtcttacgttaataaaaacaagtgcttctttttcttcttatcacctttcagtgtctgctctgctggctcatgcagtgtaggttggcttacctctccctggaagtcacattgtccttcagaactctttttactatgacccacaaacagttttcagacctcactctgatgagtcaaaggtaaagctgtgaataaacagatggtgaaacaacatttgcagttctctgacttcagtcctccctgaaacccacttggaatctagctctgaattcagccggacatgtttgttcttcccttttcccatcctcacctactcctaaccttcagtgttctctttaccttttatttttatttttgtcattttagtagtaaatgacagggacatagttactcaatttgtaaaacattgaatggtgaggtcaaagattctatgacgagcttgagatttctaacaggttcagatggatgacagcaacattttgctggcttaattttggagctgtttttgtaggttttgaaatgcagtttaatagtgagtaatagagaagtttctttctgccgtggagctactgaacccttgaaagtaacatgctggcacatacagatgaactgtagccccacatttattccttgcttagtggtaagctgtacactgaacaatagaaaacaaaaggctatttttctttggaagagcagatactgatttctggacaaagtttatgttgtacaagttaaacattttttattcttttctggttagattttctgccttttaaaaaattagcttagttgaaaaagcaggtattattaaatacagtttattttattgaattggacggacaatcgtagaattttaaagcttaaatggctttaattgaacctaatgttctaattttacagaggaaacatttgaggcttagtgcggttaaatgaccactcctacaacacacagcctgtttgtttgatggctgaggctgaaaaccagactccagactcctaatttaatgcttttccttcattggtcatgtctttttagcttcagtgaagatcttttttttttttttttttttaatttttgaggttatttaaaaaatactttgccttgaaaatttaacatttccacttaatcattctcatacttcaagaacagtttctctgttaactttctgtttaacttcttaaaccatacactgtggaaattatctgtctatatgctgaacagtctttaatgactgcatgtgtgccgtagctgttgagatgttttaatccactttagcaaaaggtttatttgtttaagaaaagtgcagtgttgtattaagtctaagcttagaacaatgaagcatcatctcccagctactgggagtgagaatgggaggggcagggagtggttggtactatgagctgctctaaagaaaattcatttcagcttcctcacatgttaatacaatcatatttcagtgaagcccttcttcagcaacagtcactaatgatagagtgatgtgtttagacttgaaggttctttaggtgctgtttaaatgaataatgagtgtagttaattcacaatacaggtgaaaagttaaccacagagtagtggcactgctctttctttccccgtcacctctgtgcatgatctcttgctgcgccattagaagggatgattagaatgggcaaatattccctcccggtgctcctggcaataggaaagcactgtgggtgagatatgtctgcagagcagtggtatagtttcaggaagggacctcattctgctctctggggcaaagcttccgggtgcctgagtgggcctcttcctagtcgatggggcagcttgatggggtggctatttattggtgaaaacagtatccatgtcccattggttattgggacttgattcctaatttgaacttaggtgctgtgaagagacttatgtaacgctgtttaatccatgtttggctttgttagaagagtttaaaatactcagaaggaagaaatgtttggttcctttgaaaaggcagactgttcatttagctagggagagcctcaccaaatgagtcaattaaaaacatttggggattaagcccagtgagagtgctgtttttatatgagacatgaagagggtgggggaggggcgggtggaactatggggaaacagcataggaaaaaaaagatctttagaaaaggaaaaagttagccttagctcttcagagagcactgggtgggaaaaaggatttaagtggaaagaagaaaagccctagagatttttgtaccaaaaaaaaaagagtgctgttaaaaagatgaatcaacagctatattctaaatggcgtctccttaactgggatttgaagggaagagaaggcctgagtagagtcttagacaagtccaagggtaaaaaagcaaacagatagttgaagaagtggaaattataagtttggtggcaaaaacttacttgtaattagaatttttgtgtccttaatacttgttgttatgctgatatgataatatgctaataatatgctaaggaattttcccaattcataatctaaagcaaaattaactaatatatgttctgttatggaaattcacctaaattgcaccagcaggtgtattcatcccgctaatactaacactctgttactagctccactgtggcgtttccactgtaacgtggtggtgttggtgctactcattgtgacagtgtggtgtcccaaagagtgagcaagcctcgccaacgcttccttaaaactcttactgatggaactaccatgtttatatagcaagaatattagagaaagaagagtcgagaaaggattccacaacacacatctagtcttttcctctcttagcttttagggtcaacactacctttctcttggaaatgagaaggggagaaaaccttttccactattctgaaaagagggttttaaaaattctctcaggtcgcctaagctggaggggctttatgacagcactaaccagtaggtcaaaaaggaaatttattttttcccatcataggttcctctctacacagagaatgcaaaaccgtaattcttaagagttcctcaatgattattcacttttgttcttacttccatatttctctagtaaagatttaaatatttaattttgtagactcctgaaataactgcttccagatagtatatttactcagaatattatttaaatgcattaatgctgacattgttagaaaggggagaaaactcaacattttccggcagaaatcattgtaaaatgtattataaaatttcctcccttcctaagtagagtgctactatatagtgaatataatttaactttttttcttggagacttattgtcatttctgtgaagttattacctcgacatagtagcgtcctgatgcctcaaaagctcataattcttctcgatgccacagcctctgtcctatctacttgtcttggttgtcatgtcttcaatctcctttcatatttgcctatatctgtaaacttaagagaaaccagataatcaatctgataaaatcactaagctgaatcatatacattaattctcattcctagctctctccacctagccagtgtggcctgaggcattcatagccatgttctgagtggtgaaggctaagagagcccaggagagctgtccagggttaaataagacattaatatataaagtaaggactgtcggtatacgtgatatttatatgttatcatattacattttatttatttatttattcatttatttatttgtatatatagagagagaaacagagtctcactctgttgcccaggccagagggtagtggtgccatcatagctcactgtagtgtcgaactcctgggctccagtgatcctcccgcctcagcctgctgagtagctaggactacagacttgtgcgaccacacttattttttgtttttaatttattttttgtaaagacagggtctcattccattgcccaggctgcatttttaagtttagtaactgcccaaatggacattgggtaaaataaaaataaatacagtcacttctcttcttaaatcattcacctctcaagatgaaggtactaataggacattttctagaacttcagtgttaaccacagcaaggaggaaagacaggcctgttagatgtagactaagaacttcagaagctgtctccgtcctaggctgggcccagggctctagaattgtcccacacacctggtgggcttgcttgggtacttgggtggtacctgggagatgatgacctgttcatcttcagcttctgttattccaggaaacagaggtagtcatctggatactacaggtttgccagctctgctacttctgcttctactgcaggaggaggagctatggaatttttatgcatgcatcaaaacactgacttggctcataagactgcttaaaagacagagtgataaattacgccttgtttctcatgaaacagatttttcccaaaagtagaaatactaatttataatgtatccttttcagaaagattgtaagtctaagtttctcagagaaacagtgtatgtgatggcaggaccccagtaaagtccaaaatatcccataatggccttaggaccatgcccatcatagtctccatagagccatggtccccaagagccatggtgcccaagagccaccacttcagtgggtggtaggtggttgtgaagaatggtcactgtggttcacagaataacagtgacaattgtgaatagaagccagtcattacctaactgataaaatgagtgaggctagcaaagggcctgacaggaagtgaaatcacttactgaagtggtggtagagtacgcaaccaagaactaagaacaggagggaagttaaccctagggagagttcgactccacttgaggaggaacattctggcaatcaggactgtctaaaaatggaacaagctgattgatttagcagtgaaacctctgtcactggagatgttcaaacagaggtagtaggaccctcttatcaggaattctccagagaggagatgtgagttggatagaaggttattgtagacgaccacttgtttctctctcagctctgaaatgtagtccttaaggctgacgtgtgtttcccagtttctaatcggaaaagataacataatctacagtgttgaaataatttaaacaaagtaaataactgtgcttttacaaccataatacggtttagcctttcattattttgttacgttcctcattaacatagacataatttcttttaaagaagggacaattgtgacgagcctgggcaacatggtgaaaccccacctccactaaaatacaaaaaattagctgggcgtggtggcacacacctgtaatcccagctacttgggaggctgaggcaggagagttgctagaaccaggaggcggcggagcttgcagtgagccaagatcacaccactgcactccagcctggcgacagagcgagactccgtctcttaaaaaaaaaaaaaaaagaaaaaaaaaaaagaagtgacaaaacttacccagtaaactaaatgttaatttcctcttctcaggagcataatactaacttactcctctgtttttatatttttgagtactgataatcggatagtgatatatttgtgttattttttgttcaaacaattgaattcattcttagcaagaacaaaagtctatttgaaacatgtaggcatcttaggtagattaaatttttcattgtttcaagttttgacttttgtatttctgcacattagtgatccttgaagattaggcaaggccaagttcttttgacttttataattagtgtgtcggaatcccagtttttcctaccctagggtggactgtattttttacaattaactctgtgaagggtgactgggggtggactggtgaggagaggcttccagttaccagagagcctgtgacttactctctgtgcttttcctaggtcaccaattttcaaagaatttgagtataattaaatacacttcataataaactaggctgaacataatttaatctttccctgaaggtacttcagagtcttggagtgctttagggccatgatgagcatcaattatgttctcacggtgggtgtgcagaaggaggtagttaatagagttctgtttgatcaagtcctgggtgactggacatgtgttctgttatgattagcagttcagtgtccaggttttggaactgatgcttagtattaaattctcaggcaggagagaatggaatagagattgacctctttggctttgagaggctgaaagttgatgacgataattcacatgtacatggtatatatagcactttttagcttccaaagccctttcacataccttgtcttccattgcttgtttcttgtgatgttctggaaaggaagcaaggccgctggtatcccatttttacagatgaggacagtggagctcaggaagcttgagggacttgcctaagctcatacagtagatcaatggcggagaccactggacttcaaattcagtgctctttttagtatttcaaaggatactaaacatttgctcacatctctgatgttctttgtgctgtatgtgtagtaactcatttaatcctcacagtggccctgttagtaggtagatatcagttcttctggtactattacgattctcatcttcagagctgaggccactgagaggcacagagaagttagggcatgcactagtgagtggcggagctgaaatctgaacttagagctttggctccagagcccatgcactccaccattatgctacatggctactcagtgtacagatacactgagcttaagtagaggagaaagcttatctatccatatcttcccatctgcaaagacctctgcctgtatgggaggtctgggctcgttctgactaaggttttgaacccagatctgccaatttgagatcttgggcccattacttagcctgagcttcagtttccacatctctaaagtgaaaatatagaacatggaatgtacctgtaagaacacaatggaatacaggtaaagtgcccagcacactgcttattccttagccttcatgttttagaaagtggttgctattgtttttgttgttggtggtggcggtagtggtcttcttcttattattatttatatatttacaatggccaaaattatatgaaatgttttccaaaaattaggtatttgtacccttcatatgaatgtgtgtgttaattgggtataattgtctttcttgagtctttaaaatagacaaatcttttgattacatttgttaatattattgtacctacctatatctgacttgacttacaattttacttcattaaatacatagcaagtcatctgagaacccaaagtaatcatacagattacttgccatatagttaatttgtgactgtgatatggctgctaaggtagaggtttgaatttaaaagcacaaagaaaaatgtttacttcaatggttacaaatagattaatcatataaagtacatatttgcagagtctcgctcagtcgcccaggctggagtgcagtggcatgatctcggctcactgcaacctccgcctcccaggttcaagcaattctactgtctcagcctcctgagtagctgggactacaggtgcgtgccaccacgcccggtgtatttttagtagagatgaggtttcaccatattggccaggctggtctcgaactcctgatgtcaggtgatctgcccgcctcggcctcccaaagtgctgggattacaggcttgagccaccacacccggcctattctaaggcttgttctaaggctcacagatggcaccttctctgtgtatcctcacatggtggaagaggcaaagcagttcctgggggagttctttgataaaggtgctaattccattcaagagggcacctcccaagggctccactccctaatactatcacgtggggagttaggattcgacatgtgaattttggaggcacacagacattcaggccaaggcataaacagtgaccacttttgttctgtctgtccacacactgcctagagcttccatttatttcaactacatttgcttttttcttatttatctgttcagagtatcttctcagtggctatttatttaccaccctttaacatgttttcttgacattgtacttcagcctgtatatgctttgcaactcaggaactatgctggcttaactaatagtacctacttaacaggtgaaactgacagtaacagcttaataggtgctttccatttttaacatacctcagctttttataaatacaaaaaactctcaatcttttaatgtggttttaaattttaaacaggtcttctttcattttcctttacagaaaactgtaatactgcatatgcattttcaaactatgcatatttcttcttcattccatgtggaagtttttattcagcctttcagtaaattttacttagcttgtcccatggatgccgtaggtgtaaggaatatgatagtgaacaagacagacagagctcctcccctcagggagctttgccatgatacacgatgatgacaatgataaaaggagcaaataatgatttgggacctgattccaaagggatatttctgcgacacttacaatgaaattccaacctggcaccatctttttcactgcagaatgcatgaaggtggttgcatcatgtcatttcgacatgcatttaaatgtaatgaaaggcacaagtagtgattgcaaacactacaataagttgcttgttgactctcttactgtcttccttcttatctccctttcttcctttgtctcattctcagttttcagagcttagtcattatttcgtaatcctctcctaaaatgaaatctggggctctaaggacaggaggcacaggttgtgtttgaacagcatcatcgtgctttatgaaggggattggaggggagattctgccccacagtatggtcaggtctcgctccaggcagcactgactacattggtgctggttgggtaactgtggctcggcaggtcactctccctctttccacctccgttttctcattattagtagaagtcgaaatagcatggttttctaaggcctctgccaatctacaattctgtgattcatatgttcctaaacacttgagttactttttctcaataaatggaaatatattttccaatgaggctggaaatacattttccaattatcctctcccctggtttataacatatcatcaatgtgttgggacttctaacactgcttctgctgtaagcccatcaagaggttaattacctttgaagaatgaggaactgctggaaaagaactgtaaaaccttcaagagaactttggagttaatccctctggtaataggaatcaatgtcactcacacatctagttgccagtggaggaggaataacagcactgggccaagtagacttgaaggaaggcaggttgctgatagagtggagagctgaagattctgaatcaagctcatcatgactctcttcctcctctttgaggctacccaatcagagcaaaaacagtattttaaaaaacctcaactggatgagcctgatgcagtggtgtgctcatgcagtcccagccaaagggtcacttgagcagaggagttcaaggccaacttgggcaacatagtgagaccccgtctctaagacaaataataaacatcaaaattaaaattaaaaaaaacccaacccagtgttcccttcagaatcctgagtggtttgtttcatcttcctctattctggcttgtgtcatcttcctctcttgtaatggataaaaactccaaatgaagacaaaaatgaggaatttgtcaaaaaaattgaattgccaacaaaagccatctttggttgatcaaacggtacagacgtttcagttagacaagagggctaagtttctgagacccattgtacaggattattaatattattcatttttagccctcataataaggtattataaatgtcaagattgctaaaagaatacgtttttaaatgtcttcattataaaaaataagtatgtgaggtgatggacatattaatcagcttaatataatcattttatagtatatgtagctatatcaaaacatcacattataacccataactacatgcaattattatttgtcaattaaaaatacaaatctaggccaaggtgggaggatcccttgagcccaggagtttgacagcagcttgggcaacatagggagactccatctctacaaaaaaaaaaaaaagaaaaaaaaaagaaaaaaaaaggaaggaaaaaaaagaaaaaattgactgggtgtggtggctcttgcctgtagtctcagctgctcgggagctgaggtgggaggatcccatgggcccaggagtttgtggctgtagtgagctatgatcatgccactgcgctctagcctgagcaagagagtgataccctgtctcaaaagtaaaaacttacaacaatataaaaaataaaaatttaaattataaaaagccatcttctttcccactccttcccattttgatacaacagtcccagaccccagacttgctttcctcatgagtcatgcagactcaagtattgcagttccaaaacactgcctgactcaccagctccatccaaaagagtatgtattgtcttcatatgccagataggaaattcctgctgcatataggaaaagcagtgtgtttaaatacatggacacacacacacatacacacacacagagtacacatatacacatctgcatatacacgtacacatatgcgcacatattcatactatatatgtacatacacatgcaatacacatgtatacacaccacacacacacatacacacacatgcatctccaagtctatttccatgctttttttcagtaaagcacctagacaaaggagagagatgtctaatcaggttttggtggttgtcagggatatcataaatgagaatctcaagttactaaacttgatttcacaaaatagtttattggtagttttagaatggcattgcattttaggcagccccaattgtaaataagtgagccgggtaaaagcagattggatgtcacccagaatattttctggaaaggggacatacacaaaattctctctttgcacaattaccctgttttgggtttgcaatattatgttgagcaaggctggctattttccaccaacaggatgttacagcttgtcaaaagttattcaacctatagtgttaagcaggtacttcatcattactgaatttggttgatgctctatggagaaagccaaagttaggagttttgtctgtcattgaggtagagaccctcaactagggaagctttgaactgttcatccagctggtattctgtaccaccttgcctctggagttgagcttagaaccctacttccattttttctgtcacttcagggctgtttcaactattgtttcttcatttacttatatcaagtgtgttttctcaattcataagcatgggagaccccaagagacagatatcgcattagtccttttttgtttgtttagcaggaaggtttttaagtaaagctcctaaatgatatgtctcattctcatggaaattcatcaatattgttttactgtctcctatctggttactttttattttaggtaaccactgtgatacaatatacacaagtccctggatcatgaaaataaattgaagagctaatgttaatagtaagttctcaaccaggggttatgctggaacccaggatacataacccacaggagggccctccgtgaactcagttttcatggaattgtcccataccttcacaggtagaagcatggctatgttaaaagtggccaatgaaagtatagtttctttatgccttatactttgtttggtgaggatttctgccagaggtgtttgtttcctttagttttctggttgctatgattttatacagctttggtgacctctatgagtaccagataaagttaggtatgataaaggcacaaaaagaccgtagaagccatttgtattctaaatataaatatacagactaaatttgtatgcatttgtgtcttcattcttcacggtgctgtatcctccgtgtgtgtgtgtgtgtgtgtgtgtgtgtgtgtgtgtgtatttcttctttgattccaggctgcttatacgaaaatgctgattcatagtgtcactgtcttttctttttcctgcgaaattctaaatccgtttctaaactttttctacaactctgagtttaatctctctaaagtttttttttttccctcttgcggacacaaggcactttgctttgtttatgctaataaatgtcagactagcccccaaaaattagaagaaatgccagtaatttcaaagggctcttgagcatgattttttttcctgtttcttaatacattgtacttttcagagtttaagtttaggtgcatgtaggtggtattagaagattcttagattttattggtagcatccagacaatcttgtcatcacccgatatatatcacctctatgtggtagacccttgtggaaattttctcatcacgaaagtcgaaagtttaattttggagaggaagaggtttttcagatacattaaataggttttgctacaataaggtgagatggtactttcaattgagcatttctcatatactagcaagcagacagcttggcctcctggttgtaattacatgccaatggcttggtgctttttattttagaagttgagttcatcctgaattctctgagcatatggagtagtgcactctgattgttcccattaagattgtaattccatccaaggcttatagtgtcattgtaaacactagatggaattacagccccatgcacattttggaagactgcattattcattgaaatactttataaagttaaataattttgtaaatatgctccaagttcatgggacttagatagaaacataatcctggccacaaaggaggttctcagtaaatatttcttgtttatttgatggactttccttatatctttaaataaactgtatttttaaaaagtgtagagaggttatacttaaatatttgtaggactttaaaagatcttgccttgaaatgctcttacggtttcttgcttttcattgatggaaaaattgacttcccatatgaatatgttatttaatcttttctgtttctagcctagagagaaatactgagtagctcgagtggtcaagaatctttattttagggacatccgcatgtcctaagtaattcccttctatataaatatctcttttcggcataatgtgttgcatgccttcaaggtggaccactatgaggtgaataattacacaacgggaagcctggctgtctcgtggaatattggatggatggctttcttattggtcttaattaggacagtgttgttaagataattcactaattcacagtgcgttatcagatttgaaatgacctcttttttttatactacttcggaagtgtatgtataccttttaggaaagacctggaaggataagttgtatattttagtatctgatatggttttaaaatttaagactctgtgttatgtatgttttgggatgactataaataatctgtgtaacaaggtattaccaaaaaccttattgcctttgccaccatgcactgcaaaatatagtatcaggaagcgaaaagacaatgcattttgagtaatttttagaatttgcatttttgtgaattgacatgtatgtatggaggacttttcaaaaaaaacagaacttttcattaagaatattcggtattaagatattgttttaaatgtcagatatttttaaaatatatgaaaccatattaatcacgtattacttatactttttgtccctggaaatattccatttttaagaacagagataacaaataaatataccagtaaagctaaagtcagtgctttctgctcttaaaataatttattgaacgataaaatgaatgtctttgctttgtgaaattatatttttgtttaggacttgataatgcttagagaacattttagtttttacagtttaaagaatgaataatgactggttcctctgctccctgatttgtttccatgtagatagtacttcatttttattacctgtaaacatgtgttagctttatcaattaggctcaattgaatgaagcataaccccctgaaaggccttgccagtaaaataataatagtaataataatattcttttcttcagattctagcagggagtactgctggcttttatgtaagaagtcaactttaaaagtgtttttgtgtgcgtgtggtgtgggtgcagcagcaatattgtgtattcctttcaaatcaagatgcctcatagtctgtgggcgggggaactccctaagatgccctcactagttactcattcatttgttcctccccagaaagggaaaacccaatgctccacactccacttattctgaataatgggggcggggaggtggtggcgtgaggatgtcagtgtcattgggcaaaagccttcatttttaaagtttagcaaaatgcagttttattgctttatgatcagtgtgtattacaagctaatatacaaatggcattagtgatcaaagtgggatactgatgtggcaaaaatttacaatacacttaacagattgacctgacataacagtgaaagcatttgaattccttcccacatagtaagtaacaagtaatttctggagccagaagtgggagggtgtgtgtgtatgtgtgtgtgcatgtacgtatgtgtgtgtgtgtgtgttgtctgtagaagttaacaaatatgttagttcattgaccatttctttcgttgtcctaaagaaaatttcactcacttgtgcttctgatttgtttcccgtgaagtctcttatcactcttagaacatgaaggcgaattaatgaagaatccttaattcttcaaaaaaaaaaaaccagccctaatttaagaaaggagacatttaacttgctaataagatcctaaaattttataggttatataatacattcaaggaaattgaattatatattcattaagaatacattatctctattagcagagagtaaatgattgaggttttactgaacgctaaatgctcagaaagtaaatgcaaagaccatcactggttgagcacgctgggaactgggtggaagtcttaggcctgtcattaactgttgtgcggcctttggcaaataaccgaagttctctgagccttaggaaaatgaggaagttgggttatataagtggttttcaaatgtggcttcagaaaaccctggagagccactgcactccagcctgggcgacagagtgagacaggcctctgtggaattagccaagggtttgggtaaggggtggggctgagacctgagaatctttatgttacaacagctattaggcaatgtcagttcacaggaccactaaatcaaacaatccttcagaccacttccgactctcaagtttcaataagtccctagaaaacatcatccttggtccacaggaagcaatccaataaggaacttggtctcccataaagaatccaataaagaaaactttaaaatgagaggagggttatggatttgatcatctccaaggacccctgtcaagcaagtctaagatctttccaaaggagatctgagaaatatgtctgtatcccaagaaggtttgacaatagtccctgaagtttgggggatgacttctagatatccctgtgccttcaagcgtgatcatgggctggatttgttggccccatggtctgcctctgagtcacagacaaatgatgaaaaaaagaacaattttctgtcagcatgccagaccaagggaggggccaggagaagaaccgtgaaccatgaactgtgccactgctggaggcactgacagctccttggcaccagatgtgtgacctcaacccctgcagcttgggcacagataatatctcagggcaggggatgaggaatagaggaagaagggaaagttgcagggatcctggagtgttaatacccatggtggcggcagagcaatttgccaggaagaaaactctctggttaaccctccggcactagttgccaagcatgtttgtactagaatggagttcaaagttacaaacagagcactgtctgtttttaaggactcatatgaaaggtttgcttgtcctaagcctgaatccaagagtctgtctgtcataaacactttcaggtagcccaaaaatcccttcaatgtgatctccagaataggggaagacaaaggactcaggtcttcagctgtctgatgaggagtgagaaatttttctaatgaacatctctggcttatggatattaaggagagttcagtgtcaaaagtttctgcagcgtagttaacagaggtggaaagttgaaataaccttaaaggcactgaagctgagaaactgccctctttatcctaacagccacagttagttttggaacactgtccatggagaagctcagggctgtcaatttagaaagcagctgtgtgctggcccattgggcaccatctttctctcataggttgttctagtccaaggtgaagaaagctacattttgctctaagctagactgacatatggacttctagatttgaaccctaaacacaggaggaagtgattgattgtattacaaaaagaatcttctttggtaaataactatttttttttttaatggccagatgggagaaagcaaaagatgccttttcgtggtgttttggaaacctagatctcatcaactccctggttggttttggcggtcaaggctttttatgccagagcaactgtgagccaggtttctgaggttcttcctgacccatgttggtagcctcttaaaaataactgtcattccaagttcagctaaaatatataactcaacaaataaatacatataaagcatatgaatagaagcgggaaagtgaggattaacagactggagagtaagagtcttgccatgtaaaatactataaaacactcttaggaagtctcttgcttatgttattacttgtacagtaaatgtggagacctggatctcttcctcatggtcccttatttcttgttttcctgctgggaggtttcaagtagctgatcccttgcacatgtactttaaaacttcaattatatttgtcactggcttatcatgggcaatgtatgtgaatgtgactaagggtcctgataaattaaatgccacttttacatgttcctttctttttcttctattagtgttctttaggactttgaatgggaaatcctcaaacatgtaagtctatgtggcttcagaaaaccccagagaggccaggcgcggtggctcacacctgtaatcccagcactttgggaggccgaggcggacagatcacctgaggtcaggagttcgagacaagcctggccatcatggtgaaactgcatctttactaaaaatacaaaaattagctgggtgtggtggtgcacacctgtaatcccagctacttgggaggctgaggcacgagaatcacttgaacctgggaggtggaggttgcagtgagctgagattgcatcactgcactccagcctgggtgacagagtgagactccatctcaaaaaaaaaaagttctccccagtggcctctactgaattatccaagtgcttgggtagggggtgatgctgaggcctgggaatctttaataagaaagaagaagggaaattccttatgttggacccaacattgagtgtgttcagatacagatgttggcaggtatgggggcattcggaaggagaacagcggctaaccaagctaactgagactgagttcaagattcgcttctggttcagggggactttcgttttcaggctctaatacattcagaagagcaaatattggtactttaatcatgcatcttttccccctcaagttctgtatctgccacgtgtatattttatttggcatttaaatgcacagttcttataattgctgataaatagtctccattgcacattttgctggcactgtggcctcactgtaaatgctctctgtatgttcttgggaagttgcataatggcagttactctagtttactgtgcaatatgctcagtgactaatggcctaatcatgacttgaaaaatatataaacagttcaacagaagcagttgattcactgagctctttcatccagacaagggtgagctaatgggaataaaaaagacggaggtgtgcagcagcgtctttgatgtattgaagttagagcattcccacaaatcccatgcattattgctcattgatggcggatcctttttcatatgcatgaggcaggagtgccaaattatcgtcctaattggctctgacttggtattccttaatgttcgtgttacacttgttacaacttttttcctttcctctaaatactactgacagtaacagctttggagaggcaggctgtcacgtggccccatggcgtcaccctacactgcaggcttaagtgtggctctggtcctgtgctctggtttcttgggatagaattacagctgagactgtgcagtgcggacctgcctggtttacttcaggggcattgttgattgacacagattcttgttcccttgtcctcagtggcaccttttcttccaagaggaacagagatagagtcttacaacagccattaaatagaagatcctggggtctactggagcactgtcccattggtggggagaaataacaatcatcatcatcatgtctcccttcctttggaattgattaggtagctcctatattccacattcctctcacctgttgaccacacacaatttttggtcttgtagcttggccactcattttagctcaatcactggtttaatttttttaatgaaatcactcaatcgatagaggctaacctctcgtagatgtaataattccaaccattctcaaagaaataatgaagggtggaatattatgctttctaaaataatggaatttattttttctttatgcccacagctgtttagtcctaaagagggggaagaaagaatctttcgatcttttggcatgttccatgtcccgtattgatggtcatacttcagcttttttctggttgtttaagaattatgtggccaataggctgccttgtatataacagtgaaaaacacccattacttgtatttgtttcattttaaggtttaggcagttggagcataggacagtaactggtttcccttgttttctggaacctgccccttgctctctcttgggtgatgcctcacccctgccccagtgtcagagctgccctgggtccttcttcccttgaagggtctgatgaatgaaccacacagcttgttagtatctcagtttgttaatcctcccggaggaatgtatgtttcaaaaaagaagctgaaaagtataatggatgagaatttgctttggaactcagcacactgtagattagagaaggaaaagaaagaaaaggaaggaacagaaggacatgtttggggggtagggggcctttctggggcttctgaaagcaaatgttgtgataattagttacagtgtcccaaagatgcctgggtctacccctgaccctctacacaggccaattctgctcccaccagaaaaaaacaagagtacagagcaaagaggcagggcagcagcctctgatacctatttgaactttacacattctgatagaatttattatctgtattgaatatgggagactgtgggtaaaagacttcaagacagtgaaaaactaggaaagaaaaataaaggtgtattgggccttggcaaatttttgacacttacttgactatgtgctttaactttttgaaaaggcagataatatagcaatcacattaaatatttatctttaaaagaaattattttaaaaattactcttaatattaccacattatgaactcaataggagatcctacagttcctttaactttaacaacagtacatttgttaatattcattaaagttaaagaagcttactattacaacagaatgaagtaatacttgctggaaaacaccaatattttacttatctttatctaatccccccgtttaactgtagtgatacaatacttaattttaaaagaggaatggtttgaatgtacagacttttacatgtgttcttccattgagttctttcttgtagtctaacccaatagttatcacacttcagtgtacatgaaaagtgcagtaaaggattgtgcagtatacataaaatcctgtgtggagtgtcttgtgggaaagccaaaggattttcaaagttaattttgactatatatgacttttgcttaacttttgaacttaaccgcccacataaaaactcactccactatatttcccttctctttgcctccctacttctgtcccccctttctcccttttttccttcctcccttgtattcttccatccatccatccatccatccatccatccatccatccacccacccacctatccatctatctatcctcccatccacctatccacccacccatatatccatccatccatccatccatccatccatccatccatccacccactaactcatccatccatccatccacccacccatccatccatctattcatccttccacccatccgtccacccacccacccatccattcatctatccttccatccatctattcatccatccacccatccattcatccatctatctatttgtccatccatccaccctcccacctatccatccatctattcatccatccatccatcttttcttccatcactcctttctttttttttttttgagatggagtttcactcttgttgcccaggctggggtgcagtggcgtgatctcggcttaccgcaacctctgtctctcgagttcaagcgattctactgcctcagcctcccaagtagctgggattataggcatgctccaccacagccagctaattttgtatgtttttgtagagatggggtttcaccatgttggtcaggctggtctcgaactcctgacctcaggtgatccacccgcctcggcctcccaaagtgctgggattacaggcgtgagccaccgcacccagccccttcactcctttctttttctctttccctgccttccttttgataaattaacttaaacattttttttggtgaaattaatatggtgatgtctacttatatttaaatcagaaaattattagtatgctgaatattccaatctcttaggaatgataaaaatattctataaaggtcaatcttaattccacatcctatgttcctactcagctttctgtctctgatttctcatttttagctgggaacatcccagccaaaagacagccaggttctctgtgagcatagcatatcaaactaactgtaagaaaataacattttggcttaaaagccatcttctaatataagatagaataaaaatgataatgattggtatactatgtggcattgttagtaagaatttgaagtaagatttacctaaatcgctgaaaatattgaatagttggctgagactttagaattggtacaaacatgtacattttctcaaaatcaaaagaattaaaatagatatccaagaagtcagattatgaaaaaataagatagtcaacggaaatcctaaaagtaacttaaacattggcattggacatatttcatttgtatttctgccatagaagagttaagttaatgtgcatttttgccatgcaatggcaaaatgaagagacttttttttcccttctttttgctcttggtaaaattaagtggcaaagaaaagatagctctgaggttattgctagaattttgtgctaaaaacattttggctagagcagcaagtttttaggcaaacagcccctgataaaagttgcaagaaaaaaatctcattcgagtgcaccaaacacttttcagatgaccatttaatttttttaagttgcataaacaatttcaagtgcactgtaaatatagaaaatagggtatgatagttgacagaaacagaatgaattaagagcagtaatagaaaattgtaaacaattatatctgaatttcatcagttgtcttgcttacattcacaattagtcatcccgtgaaagacataggtgaacatttagctgcttaaaaaggaattagctgcttgaaaggacaaatgttcatgttaaatttcatgaagactaaccttcagcagacaacggcacaaatgtgtcagctttttctggtgtgaatgaagcaagatacaggcaaaacagatgagataaataggacttggaaaaaaaattctactatacaagttttgtatccccatctttttgctctttgtggagcacctactggaaaccactcctgacctaatgatgaggacacagagagaaaattcaataagcaatggcctgaaaaataatttttatctaagtattagataaacgcagtagcatatttgacttgtaaaaataacatggctaggctttgtatgcctccctgtcctcttacctacgtgggattttcaaatagcactgattctggggaggggaatcaaaaaatagaagactcccctctcccagagcacacgtaattaatgcctgtgttgcagctgggagctctctgccagcagagttctttgctcgtcatctctcagcgctcacccacattccccttgattcacaccgtattgtttgtttacatgtttgtctccctgactcaggttggaaatctttaaggacaaggacaacctcttgttcctttttacatttcccatggtgctttgctcgcagtggccactacagacatgattcattcattgttttaaaaaaagtgttaactagttaagtgaaaataaaatgaaacagcaaaatgagacaaacgcctagatctgaaaggctacaaaatacagcagagggttcagtggacataagaggaaaggaacacaatgatatccccaatcttgtgatggaatagaaaaaaaaaaagtgattggtgttgatgtaacacttttcttggccagttgaacattccagagtagaggtcagttttgtagttaaatctggtaggaagatgtttccaaccagaaggaatcatactaaaattattttatcacaacaagcagtccataaccgaaactttaatttgtgagttgggaatcaggataggaaacccaattttatattctttttataggaagaagaatccattccaccactcagactgctttcctctttcataatcgtggcatactctgccattgtttgtttattttccccacaactagatggagagtgcaaggaccatattttactcatgtgtatcctcagggcctagcacaaagtaggcactcagtaatgaagaagtaagatgtttcaatgtccctaacatttaaaaggatgtatgaaactagtgctaataccagaaagagttggttttcataggctgttaattgtgggttttgaaataatgtactactttgtacattgattttatacaactgtgttatatacttcagtaactttcaaggtaaaaagttagaggttattaaatctggcagggtcttaaaacctgagtctcagtccatgtaagagcattcttttgctcttcttgactagccatgtaaaagggtgaatgtaagttagtgaattatcttttagaaatcttcagttgtatatatatttttttcatcgaattgcaaactcactcacacttaccaatgtaatactaccctgttgatgagcattagtagccttatttgggtagccagattagagacacaggcttcatggtgttacctgccttgatgttttcattcataatgcagcatttgggaatgcagcatttttctatattggagacatgtatgatgatgtgtatgttccttccccataaccctgtccgcttctcctttggcagtgtcttgcatcacaattttattttatttttatttatttatttattttttgagaaagagtctcactccgtcacccaggctggagtgcagtggtgcaatcttggctcactgcagcctccacctcccaggttcaagtgattctcctgcctcagcctcccgagtcgctgggactacaggtatgcaccacaatgcctggctaattttttttatatattttttttagtagagatggggcttcaccatgtcagtcagactggtcttgaactcctgacctcaaatgatccgccagcctcagcctcccaaagtgctgggattacaggcgtgagccaccgcacctggcctccaattttaaatatatgtaggctccatctccacctctccctgaaaaaactttccctgctcctttcgccttcatgtgtgccataagttgactgccatcaggccaatatcattacatataaattccctccacccttcgttttaattttaaaatatctgaaagggggaaagggagaagattccctaatgagtatgttgtgtgattcaggaccttggctcttagatcctcagtcatgtgatattttcagattttatgggactatggtgcaattgaagaaaggcttttgacagaaaatgtgaaatgatgaagtcttagcacggactcatacggcagtatttgattgcgggttaatctccaaacgttgaaataaagtggatctgttaaaaagccattggttactttcagttgccaggggtgtgtatgctcacattcctggaagcacattctataaagtcaccaatctacaacacagacacccacctccccctagacttcagagagctctgctgggctgcagctttctaccaaaagagttgtgtgcctctgaatttcacatccaaccttggaagctgcagtctgtttaagatttcagaaagaatgggggctatgtttccagtttactgctttgttattttgaaattgaaagtctgagcagaattcagaactacacaaaacaggatcttttcacatgtttgtttaagtcatgttcttggcaaaaacttgctgaggaaatgatctgtttctctaggagcattgatttcttactccagtacagtggccatttcccaggatctcattccaaaccatctgttttgccatcagagccagcctttcagtgaatgatctctttggtctacactgtgctaaaccttctgattgaaaggatttttattaatgaaatctaggtaataaagttgcagtgaactttaggaagttctctgtaggcagggcgtggtggctcaagcctataatcccagcattttcggaggccaaggtgggcagatcatgaggtgaggagtttgagaccagcctagctaatacagtgaaaccccgtctctactaaaaatacaaaaaaaaaaaaaattagctgggcgtggtggtgggcgcctgtaatcccagctacttgggaggctgaggcaggagaatcgcttgaacccatgaggcggagcttgcagtgttgcagtgagccgagatcacaccactgcactccagcctggcaacagagcgagactccgtctcaaaaaaaaaaaaaaaaaaaaaaaagaaagttctctgtaacagtcaaatagcaagtgctgacctctgtcgcctctgtagcagcagtatggatgaattgtgagcttgttggctaggttgggctgcgggtcattgtggaaaagccatgtttcccttgcctgtggctgggaataagtatagtggggccattttaaaaaaaagtcctgtggttgaattctgagtttgagctgttttaaaatgtcaaacagactgaatccttgggagactcatttgaatgagaccagcagcaatgtaagaatatatatatatataaaacacgttagagcatttccatgtatgggagggaactgatggagagaacacagaccaccacattaactgccacatgctgtcaaccagtggatctcaactggggaccattttgccctctcaggacatttggcaatgtttggagacactttttgatcgtcccaaatgggaaaacaaggtagcaatactggcatctagtgagtagaggccagaaatgctgctgaacatcctgcaatggggctgggggcattggctcacacctgtaatcccagcactttaggaggtcgaggcaggaggatcgcctgagctcaggagtttgaggctgcagtgagctgtgatggcgtcactacactccagcctgggcagcagagtcaggggtctcttgaatgaatgaatgaatgaatgatttttaaaaatcaatcaatcaatcaatatcatatcctacaatgcaccaaacagtcctctgcctcaaccaaggatcatctggcccaaaatgttaatagtgctggagttgagaaaccctgccttagaccctttccttctcatagtttccaagctgataaatcagcctgccttgacaaaggtgaggaggtaagctgcaggcgtgagtgggaagagcaggataaggaaggaaacggagaaaagaggtagcagcattgcatgaaaataaactacccgggccatatcccatttgtgccaaattaatatttgggattctgtctttatgtgtttggtaaagccggaaagtatgtgggtggctggctgggccatggcctttgtgttagaggtgacctgagtttcttcaaagcacctgtgttagtttttcattgctgctgtaacaacttatcaggaactttgtggcttaaagcaactgtttttatctgacagttctgcaggtcagaaatccaatacaggtctcaccaggctgaaatcaaagtgtcagccaggctcattctctgtagggactctagagaataattcatatccttgccttttccgttttctttcttttcttttcttttttttttttttttggcgggggggaacggagtctcattctgtcgcccaggctggagtgcagtggcacatattggctcagtgccacctccgtctccaaggttcaagcaattctcctgcctcagcctcccaagtagctgggagtagcccagcaccatacccaactaaattttatatttttactagagtggggtttctccatgttggccaggctggtctcgaactctcgacctcaggcgatccacccgcctcggcctcccagagtgctgggatcacaggcatgaaccatcgtgcctggcccacctttttccattgtctagatgccattgtatttcttggctcctggccccttcccctatcttcaaagccatcaatgttgcatctctctgtgctgtgtttccatagttgaatcttcctctgacacttcttcctccttctcagacttttaaacttccttgcgattacattggacccacctgtatcatctccccatctccagatccttaatgtcatcacatctgtgaaatcgcttttaccacgaattcacagactgattctggggattaggacgtgggtatgtttgaaggtcccttgttgtgcctaccacagactccaaggcatttactagagccacattttgctgacttgagctagatgtagcaaaagaagtgttataaaaatgggtttttaaaaaagcctttttttttcctgtggtataattttagtgtttagaagtaatttttcttttaatgcagtatgacacagaaaacatttggaggatgttgaaaagtaattgtttaaattggcaaagacacatttcagtaagggagtaaacaagagggaaacgtgttggggggaaaggtgtggggaggaaactctagaccagaggccctaggacttgaatatacaacttagtcctgttgaaaattcagattcctgggccttaaagtatgttaaataggtcaggggtggggcccaggagttgtacttttaacgagcaccctcctgtgattcatttaacataaaaggtccttggctcacacttggagaaacactgctgtagaaactcaaatacctattttaaaacaaaggtacattttaatcatttagtttaaaatgaaatcattgcataatactgatgttagaggttagaataaacatgtacttaagttcttgatattcttgtcatttcagttacatgtcagggaatgtgatttgtgttttgacgtattcaaatccttgtcatattcaaccatattcgtattcaaaatatataatgattttgacccttgattgttcgaattaagactgtcatcttttctgtgtgattaactcttgtgttgatataaatatgcctttggcttactaatgttcagtaagaactaatgactcttgggaatgttaatagactctgtgagtccctttttaatcatttgtaaccaggctgtcattccatgtttgtttggaagcttagagataacatttatgaactttgtgacacatagtagttgctcaataaatgttaactgtagaaacacattgattagtttcacttcagaaatagacacttagagttcaaaattcccatctgcctagctcctgaggcccactttcttaccagaatctttcctgataccctctcctgcataaaatggttcctcttttgagactttgtagctcttttgtacttctcttattctgttacgttactgcaaaaaaaaaaaaaaagaaagaaaagaaaagtgccaattgtgtacatgctttcctccctgctggaatgtaaactttgtaaaggcatgatccatagcagatacttcttattacaaactacctggcagaatttctttctaaagaacctactcagtaagcctgttggtgaactgagcaacatttggacaattatggcatcatcttacaatttttcagctattggttttcacttgtttagaaatgtaaaactttgcaaggacttttataaaagcaaatttcagaatagttattcactaagcttttttatgctaatgatgtcatgctatcaaaaattagctagagtaaatggactgtaatgaggatggtttgtaatctagattatatgttccacatgtaacatcgaaatgaaatataaaattgagttgttggcatgtggttgtggtgagcagaagcagttattatacattacttggtaaaattcatattcatatcttgtcagtttacagtgagccagagattaaaaataacatttgtttctgttttagtaactgcttaaaaatatccaaaatcattttattttctttagcctgacttctagtagtgttttgaatatgtggcctttcaagcagtaatgaaatgcatcaatgcgacttggcagtgcctcacaggacatgcttctaggatcatttttaatgattaaaagtcaaattgagttctaaaaaactgacccaaaatatagatgagccaagtaaaaacggaaggaaatctgaataaaatcttggttcttggtcctctgcatgtatcctccacatctgttttctccagatctcttttttcttgcttgttgatagcacagaggaagatcgcagagagtaatgtactgtatatgtttcacatcccccttcctctttagtgatagtttggagagtatactgcagtcaccatggttttcagtttggagagtacaaggatcagatctgtattttctagagccagcttttgtggcattctggagaggtgattggagaaccatgagagcaggcagacatctgggtgagagggcacgaggggtgagtgacggcagagccagacttgctggagaggcagaaagggaaggattcaagtagcataaccaggaaatagaattgataggatttggtccctgctgacctgtggaataagggggaaggcagaggagttgattctagtatttctaagttgggccacttagtgatattggggtaccaggaacaggcttagtggacccacagaagtgaccagacccaggagtctctctgagcgcccaccctggcttctctgtgttggcttaccctttcttggttgggggtcatggggtggtcagcttcagtggtgtggtctgaggtgacaggtgctcaggagtgaggacagggagtagacatcaccaatgtgaatgtggaggtaggcaacaagagttattctagaactgacaaatttaatatattttgctgactgctgagttccatttggacaaatacctaatgcatttggggcttaaaacctagatgacgggttgaagggtacaacaaaccaccgtgatacatgtatacttatgtaacaaacctgcacgttctgcacatttgtcccagaacttaaagtaaaaaaaaaaaaaaaaaaaaaagattgttcagttcagttcagagagcaataggagcagtttgctattcaccaaatagggacatcaattctttactgattaatagcagtgattcagaaaactgccttttgtagtagagcacaccaagggggtctgccggatggaaaaagagaacagtgctttgtgaactataattgttgccataagtaaatacttaaaatacactaaaatggcaacatcaggaaacatgactaaggagtcagtgtacgccacgccctttcccccacctttgtggttgttgaaaatttccaccaagagtgatgtatacaaaaaagggtaagatcagggtgttaggtttcagaggaaggcaaaaacttgtgtgattctataaatggagcttacaaatggaaatgcaccattcaaggcagaaagtctatcacagtcattaggaataagcattagagtgattctcctttcttaacttctgcacagaagtttgatgtggtaaagaaacagtctgctcttagccatgttccttgaaaatacatgtcttcaattacttggtttgtctgagagaaaggagggtttggaggagaaggaaatgcctcgtgagtttgacatactatgggaggattgttgttattattgcttgatttacatgctctcattttatacaaagtgtacagcacaatttctcaaagagtaattatgatgccaagaaaatggggtggattctgggcttcctgcagtctgtcatccaaataataatattcattacaaagatccttacccaggaggccaaggtgggaggattgcttgaggccaggagttcaagaccagactgggcaacatagacccctatctcaaaataaaataaagtaaataaaataaaataaaataaaaaataaaataaaataataaaagctccataccagtttgtggcattcctactgaaaacagaggtatacgaaatgcttgaacagggcatggaactggaggtatggatgtcattaagaatggctgagaattttttgccaagagttagtatactatcctactttattctatttcagtttgcagtaggacagacctaattctcttccctgagaaagtcacaaataaactagcatggagcttctcagtgggcacccttggctgaactctatagactcctgttctctttaataatatctaaagcttctggttcaattacatggctaatatcttgactctcaagaccaaaaggcaagatgtttaaaaataaaatcaacgttaaaaacatgcctgtgttccatggacacaggaaggggaacatcacacactggggcctgttgtggggttgggggaggggggagggatagcattaggagatatacctaatgctaaatgacgagttaatggttgcagcacaccaacatggcacatgtgtacatatgtaacaaacctgcacattgtgcacatgtaccctaaaactttagtaataaaaacaaaaaaataagaaaacaaaaacaaaaaaaacatgccagtgttctttagtcctcactcaattagagaaaaatgagagcaagcatgatattttgtatctggcactatgtgcactgccttgagagatttctctagaaggttttaagaacatctgtcatctattaatagttacgaaagccgagactcacacaaatgaggcaacattacagggggtcagagagcacataggtaagcccaccttgatgggagtcctggcccgaggcactttggggaaagagtgagctgcagtggttatagaaagacaaatgtcttgagccgggcattgaaaaatgactaagaataatctagaaagtgttcagtatgtttttaacgattgtgggttagcagaaggaaagccatctgaggtgagagaaataataagcaaaggggacagaggtggatggtgaatcaactgacccaagggagttaagcgtttagaaagcacttcaaaaggataacactacatagctccttgccttactgtggtgccttagagatgactggcatttttgcagagcttgtttcataaatgtgctttcagaggaataaacaggggattcgggctgggctgaggataccttgaattttgtttacagaccatcattttgtttacagaacatcagtgctctatcctcatgtccttctaagaatcaaaagttttaacctcacagaatccagcgtgtggcttgtgagtgagactcctttttccatgtgataaccggtctgctttggggaggcaaaagaatcttaccgacacgtacatattttaggatgggctctgagccaattcatcaagccaactcctcactttgaaacaagaaagtgaagaggatgtttcatgattgtggaatacctgccagaggaagaatctaccgaagttcagtcaactattaattggaaaggaggcagcagactgaggagatagagaatctttgctctcaggtggatggaggttggagtcctcaatctgtcacttgtgggtacattatgtagctccttcacctccatttctttatttattagaaggcgggtaataaaagtgtccactgcctaggatggttctagggcttagaggagataatgaaactcaagggcttaacatgtgaatgttagctattatcattgcatgtgtccattaacacccaaagataaccagtgttgtttagtagttctttgcgtattttctttctaaatagataatgatttataatttacctagttacttcatgaattgatttcatgaaaaaggtctttctgaatctctttccatgtactttaaaagtttattcctttagttaaaagaaattttaactagattcttaaagcctagattggaagaaagtgtttgctaaaaaaaaagtcatggctgggtgcagtggctcacacctgtaatgccagcactttgggagaccgaggcgaacggatcacaaagtcaggagagcaagaccatcctggccaacatggtgaaactccgtctctactataaatgcaaaaagtaactgagtgtggtggcatgtgccagtaatcccagctactcgggaggctgaggcaggagaatcactggaaccagggagtcagaggttgcagtgagctgagatcacagtactacactccagcctggtgacacagctagactccaaaaaaaaagaaagaaagaaaagaaaagtcatgtatatatccagaagaaaggaaatcagtatattgaagagatacctgcactcccatgtttgttgcagctattcattatagccaagatatggaatcaatctaagtctccatcaatgaaggaatggataaagaaaataaggtacatatacacagtggaatattattcagccatacaaaagaatgaaattctgtcatttgtaacaacatggctggaactggaagacgttatgttaagtaaaataagccaggcacagaaagacaaatatcacatattctcactcatatgagggagctaagaaacatgacgtcatggagacagagagtagaatgatggttagcagaggatggaaagggtagtgaggagggaggaataaagagaggttggttagtggctataaaaatatagttagatagtaggaataagagctagtgttcagtagcacaatagggcaacaatagttaacaataacttattgtatatttcaaaataactagaggaatgaatttggaatgtccctaacaaaaagaaatgaagtgatgggtatcccaaataccttgatttgaccattacacattgtgtgcttgtatcaaaaaatcacatgtacccaataaatatgcacaacgatcatgtacccataaaaataaaacaaaattaaaaatgcacacttctcacagtttcttgcctagtagaatccaagtaaatacagttttccgcccacagataactcttccctctggtgccctcatggtttatctcatgttcttgaccacatgggttaatggtctttgttaggttgtactcagtgatccccaagaggacaaatggtgggaattatggaaattgaggccagaaggaaacctagagttctgtgcttttacttccagtagggatctgtggggtttagaatgtctgcctggtcagcagttctcactttgggaacccccccacccccacccaagaccttttctggagggacatctgtaagatcaagattatttttatggtaatactaagacattatttacctattccattcccattctcttccatgtgtacagcggagtttttcagaggctatatgatgtgtgatgatattgtgtaatgaaatgtgtcaacttttggaagatttgcataattcactgaactaatataattttccaaatgaccagggtatgatgttacaaaatcatgcatagctaaagatccatccaaagttcaagatagactaatgaattttaatataaaagaatacttagagtttatttctatgcttcagattccatggtgctgctcccctttaagaaactaccacttattgagttttggtatgatataaaaaaagaatatccacaattgctgaaactattggccacatcttctccacatacttcaaccaaacaacatatcacagaaaactgaattcagaggcacagaagagaatttaaccattttccattaagccaggcattaaagagagctgcaaaaatctaaatggatctcactcttgtcactaacttttttgttctgaaaaatataattattttttcataaagatgttatttcatgtagtatgcaatgggtatattagtatttctattaaatgaactaatgaatattttacatttttctcaattttgcttctaatatggtataatagttgttaaatatgatctacctaatgaaaagttccttggggtcctcaataaattttaggagtatagaggaaactttatactcttaaaatttattgaggacccaaggagcttttaagtgtgaggaccaaaagtgtgaggaccactggcctagtctggtcagtgtctacaccctgtgtccactggtttcacctttcttctggaaaaagtgttctgtggtaaaatatattttgggcctagatgagtgctttctcccctcatagatttacaatacacatgaacatatgagaccctccaaagtctttcccaaatttatcccaacctttaaaaacaaattatcccaacctttttttatcctccttttaattttggcacaacataatgttccacaatggaatataacatcctatggaacgtaccggctggtatatgatatgggctgccctctttccgttaacaaaaaaattaaaagcaagacattttccttcaaatccatactttatttagagagaggcctataaaattcacttgcgaatctgattgactttcttaaaaaaacatactcttcattcattgtattatgccattttgcttatactctttgaagctgtttctacttctgtttccaaatgcatatgtttttttaaagctctgttttagacatttttgtgtgttaattagtagcatctgctccatgtgtcataagacaaagtaatttcatccccacaaaattgtccaaattgcaggttaagtggtagcagcctagctgttgagctgttactactgtttggtatttttaaatggcaaaaaataccttcggtgatgcatcacatgcctttaataaaacacagtcactttgggtaacagaaagatttagaaatggcagtgggttttgttgtatttctttttatgattctttctttccagtgctttagtttccattggttgtgggtacaatcctaagagtcagaccaaaataaagaatattccatcagtatggatcaaaaacatgttcctggccggacatgatgggtcacacctgtaatcccagctacttgggaggctgagctgggaggactgcttgagttgaggagttcgaggttgccgtgagctatgatcacaccactacactccagcctaagtgacagagcaagaccctgtctctaaataaataaataaataaataaataaataaataaaaaattaaaaaacatgctcctggctgctgcgtgatgagcatcatcttcctaagacatgagactgatacttgcaccacccagcaccagtttcttcccggcacagtgccattctaaatttgtattgaggcaggagtgcagcgagaatttctttctccttctgtatttcacatgtctatgccacagaaagaatagaaacatcttaatttgttataataattatagggacaatagtcactgtattttatataattcaaaagttctttttaaaaaattttttggtcttgccggttcctactgaaacacttcgtacagtttgaatccttagtgactttctattgccaactgaaaattgattttttcctatattaaaaaaaaatccagccgggcacggtggctcctgcctgtaatcctagcacttcgggaggccgaggtgggtggatcacctgaggtcaggagttagagaccagcctgaccaacatggtgaaaccccgtctctactaaagattaattagccaggcatggtggtggacgcctgtaatcccagctgcttgggaggctgaggcaggagaatcgcttgaacccgggaggcagaggttgcagcgagccgacattgcaccattgcactacagcctgggcaacaagagcaaaactccatttcaaaaaaaaaaaaaaaaaaaatccaaacagaaaatactgtggctatcttattcagtatcttgttcttttccttaccactgagtagtttcagggaaaaccctttacaattgcaaaaagacattcagtttataggactatttattacagcgttggcaaatggtgctggaaattctctaatagttaaatgacgcaaattaaccagactgaaatggaagaaccatactgaggttgctcttcaaacagcaagaggctacctttctgttttctttgacaactgaatatagcttatgatatagttaaggtatcaaagatgcaagaattgtagagctatgtggcaggttaagaagcctgatgaatggccgggtgcagtggcccacgcctgtaatcccagcactttgggaggccgagaccagcagatcacctgaggtcaagagttcaagaccagcctggccaacatggtgaaatcctgtctctactaaaaatacaaaaaattagctgggcgtggtggcgtgtgcctgtaatcccagctacttgggaggctgaggcaggagaattgcttgaacctgagaggcagaggttgcagtgagctgagaccacaccattgtactccagcctgggcaacaagagcaaaactctatttcaaaaaaaaaaaaaagaagtttgatgaagatgcagatgcttcattgcttgtgcaaattgtgtgattttagcatattctacagtggaaagtcaaatttcaggcatgcacacctaaagtaggaaaaatggttcttaaaggggtagtgtgatgcagggattaagaacctggtttctggagtcagatggcctgagtttgagtcccacctctaccatgtatgtgtgctgttgaacaggtgatttaacttctttggggctcagtttctcccactgtaaaaagtcatgtaaagttcccagaagagtgtttcatacattgtaactgtagtagttatctactgctgtgtaagtaattactccaaatcttagtggcttaaaacaacaagtgtttattatctctcagtttttctaagtgtgaatcactgcatatcatagctgggtgtctctagctccaagtctttcatgaggttgtagtcaagttgttaacctgggctgacgtttcatctgaaggatagggtgggggcggtagggatctgcttccaaatccactcacatagatgctagcaggcctcagtgatatgccatgtgggcccttccacaggactgcatcacagcctggcagtcagcctcccccaggtgagtaacccagaagaggatgcaagatcccaagatggaagccaccatcttcatgtaacccagtcttggaaatgatctcccattacctttgccacagtctgtttgctagaattgagtcactaaatccagtccacactcaagaaggctttacaagggcatgaattccaagaggtgggatcactggaagccatcctgcaggctgcttataacagtaacttgtgctttaatttatatccccttatggtctattcctgacaatcagaccaaatgagcccttaaaatgtaaggcagatcatgatactactgcattaaaaattatctctggtcttcccattttacttaaaagtcggtatctttacaatggcctacaaggcctttcatgcttataaaattatttttctatattttgtaaaataatatatatgtataataaatgctatatatgtatatttgtataaacacatgtttatatgtttagttatatatctagaatttattttccatatggtgtaagatagcaatctctttcgaaacgaagagccaggtttcccagcactatttattgattacaatacccttttcctgggccaggtgcggtggctcacatctgtaatcccagcactttgggaggtcaaagcgggtgaatcacgaggtcaggagttcaagaccagcctggccaacatggtgaaatcccgtctccactaaaaatacaaaaattagctgggtgtggtggtgggcacctatgatcctagctacttgggagcctgaggcaggagaattgcttgaaaccagaaggcagaggttgcagtgagctgagatcactccactgcactccagcctgggtgaaagagcaaaactctgtctcaaaaaaaaaaaaaaaaaaaaaaaaccaaaacaaaataaacctcttttttccctgagttgatattctactgagaacctgtttgtctcttattatgcaatctgtgtctaattgttgcatttttgaataaagatatacttagtgggtctagtaaatcatataagatagttgtgtttgttatgattttatttgatttgaaacattcaaatacatgtaaaaacaaattataattgagaattaattatggcaaacatttaataagttcctttatttgatagattaggaactaattttatttaaaaggccgtgacttacatttaaaagtccaattagctacaacattaagactaaaaagtatatttcatgactcccaggtcactgtttataggttgttgatatcccatactttgctgctgctgctgttgcttataactgttcagaaaattttcaccaaaatgtctatcaaattggaaaaccctctggagtgagatcctttttaaaatatagccaactttcacatatgcaggcatatctgtgaatgccctaggcccctgtgctttctcttctgctttttgggcttttggccttatctttgcttatgataacttcaaatggtaaacaagaagggataggtgacagagattaaacccaagccagtttgttttgttgattattattaacggtattgataaagagtttgctgaaagagggaagcatattgaaattattgcttaaaaagaagtgtgtagaattttcagttgttttcttttgataagagttgcctcatagctgttgtagtatgtgcaaatgaaggtcagcgataaatcacagaatgaatcacttccaactccttcacatctacagatataagtaagaatggaaaatattgtcacttagatgagtccttattttttttttctgtatgaatagtataaaccttacttttctggacacctagctttggcagctggtgaaggttgttaaagtaacaaatgggaccattctgcctctcccagatcgattttgctgcaagatagttgaaaataatataatccagaaatgaatttattttcttatggcaaaaacaaaacagaaagagagtactatgaggaagtatcatgctactggtaaatttttcaaactaaaaccgcattacatttcattaaatgagtttatgtccattaagcgtcaatgagcatgagtggttgaacccagaatccagtcaaagtacatattaactttctgtatgactttaaaaagaggtatgtcaacctccctgggtcagcaggttcctttgcagaagacattggaatgaaacgtcaaggacctcttccaattatagaatacctcgagatatgaagttggtaacaaataagagaaatgcagcaagatatttttagttaaaaaagaaaagattgatacaagccagtaacttgcagtgaacttgtttaaatcctcctcctctctccaaattctgtttttaccaagccggtaaagtaaagacagtttgtcatgctttgaacttcctggcttatgttgatttctatcagtatgttgccttacacatttgagtgggagctgagttacataaaactaataaaatccttacaaccccattttctgtgggtactgatagcatccaaaaaataaaaaaggcttttgccattttcaggcagttgttcctccggctagatggaaaattgaatggcattatctcaactcacatgtttaaacattaacggagagacactttctcctcctcaaaagtttttagtgttcccaggaatttaaccacagatagacacaactcctcaaacgtcccgaaaaaaaggttgactattccataaagtaatagttacagaaggctttcaaggaattagttattcacacagtaagcttctgaggcatacgagcatatcctctttcttacaacttggtcacttgatccaatctttgatgatcaccgtgggacctttggagatttatggagtttagggttacaagtatgatgtggccaccatactcagggaactggatgacagtcagccgatgggttttcaacatagatgaggatgagctcataaaaggctaaaaaaggaggcagacacctttggaagactgtttctaggctctcaaatggccattgtcaaaaaacaaacagtggggtggatttgactaagcatcagaagatgctttaacaacagcctgtgacaagtgagcgttaaaagctcacaaggcagaaaggaacttttcagagtgaccttgtcagacgaggttctaatgtgtaggctttatcagctgctctgagtgggggtaaagaggcatgcatattttaaacattcatttcatattcagtgtgtaaagtaactactgcttttcagcttgggtggagaaagtatttatcaagaatcacacaagggaaacccatgcattacctacttatagggcaaaatggaaaatgttctctctcttatgctttatcttttttgttccatcttaatagctctttatttaaaaagtattcacatcagttgattagtctgagtctttcatttgaagcaaactttcttcactttctgcccttgatactgcacatcagtctttaatcacttagacgtactgaatttttctttattcacatctttcaatcggtaaacttgaaattttgcaagtgcattcccactggtgtacattctgattttcaagacctgctacctcccccagtgtcatgcttgttttttttttctttctttcttccttcccacaccccacctccagtattttagggcaccttatgtagataagcagtgagatggcttcatcctgataattaacatgcttgtttgaggttatgaaatatacatttgagaaaggccagggatttccccctgaatatccactaactgcttgaagtggcattttcattctgacttggtattttgttttgtttgactgcagcatactggagcatagtgaaagagtctattttgaagcttcaaacttagtgctgctgcagaccaggaacaagagagaaagagtggatttcagcctgcacggatggtcttgaaacacaaatggtttttggtaagtcatccaaaagacttgacatcttttagctttaaatgtcatcgggcatcacttcactggtgtaccagaacttcttcttcaagcgtattgctatttctctacatcctaaataacaggacatttgaaaaaatgttgtcctagtgacagagcactgagagagcaaccgcatttactttatgtgtttgtttctgaaacttgcagaatagtatgatctgaatagaatgtatttgtggttagaaaaaagaacaaaagcaaaaacaaagcaaacccaaacaactaaacacacaaacagcaaataaactacatctaccagatactccattttagctgaaaacataagggattaatcgcacgagaggaagtagattcaatttaatggcaagttttttgcgtcttgtgatcaaatacagtcatgtgccacataatgaagtttcagtcaacgacagatcacacgtattacagtggtcccataagattataatactgggctgggtgtggtggctcacgcctgtaatcccagcactttgggaggccgaggcgcgcggatcacgaggtcaggagattgagatcatcctggctaacgcggtgaaaccctgtctctactaagaatacaaaaaaaaaattagccgggtgtagtggcgggcgcttgtagtcccagctacttgggaggctgaggcagcagaatggcgtgaacctgggaggcagagcttgcagtgagccgagattgcaccactgcactccagcctgggcgacagagcgagactccatctcaaaaaaaaaaaaaaaaaaaagattataatactgtattttggttgtaccttttctatgtttagatgtgtttagaggcacaaatgcctaccattgtgttacagttgcctacagtattcactacagtagcatgccgtccaggtttgtagcctaggagcaataagctataccgtatagcgcaggcgtgtagtagggtgtaccatccaggcctgtgaaagtactctgtgatgttgcacagtgacaaagtcacctaacaatgcatttctcagagcatatccctgtcattaaatgatgcatgactattgtgatgggcaaggtgaaagatgatgggggtttccaagtcctgttcagcaaacatttactgagtaacttttaagtatacatgggcccttgaatgacagtcttagtctgggggttggaattcaaacactctaaactataaataaatgataaaaccattccagagcatacaccaacataatgtggacttccaggaattttttttttatcaaccccgttcatgatattacctggaagcagagtcctcaaattgaagcctaggtctgccccacctatcttggtcaccttggagaacttgctcatcatcttggaacgacttgcctttaaagatgtatgtgcctaactgatctccaaggtctcctgcaaatttataattcagttccctctagtgcaatgaattaaataattatccacttcagttcttgcccaacagaatttctgtgtaggcttggtggtcatttgcagaggggctcattgtatcaaccagtgtggaggaaaggagccaggtcctcggggggtccctcctggccccatttgcccatttgacagccagccctttggtcaaacaggactgtcagcatctgcagtaaataatttttttgttttttttttttttgagatggagtcttgctctgtcaccaggctggagtgcagtggcacagtctcagttcactgcaacctccacctcccaggttcaagcgattctcctgcctcaacctcccgagtagctgggactacagatgcgtgccaccatgcccagctaatttttgtatttttagtagagctggggtttcaccatgttagccaggatggtctcgatctcctcacctcaggtgatccgcctgcctcagcctcccaaagtgctgggattacagatgtgaaccactgcacccggcccgcagtaaataatttattcccttgcaacattaaaaaaaaatgtggcacagtgctttatgaatattatattcatttttatgtatttaattttaatttatttatttatttatttatttgagacggggtttctttctctttgttgcccaggctggactgcagtggtgcaatcgtagcttgtgctgggaccatatgagactgggactatcctggctgtcattcataaagtcttcactgaatttttaggacttcgctgactggtctctctttatgaacttctgtcacatttagggcctgcatcatataaaatgcactgctatgtgttgttctgttagtgtttgtcatcacgccatcaggggtacacacagcttcagggcaggaatcatcatcacagaccagtagccgagactacaggcacgcgccaccatgcctggctaatttttccatttttttgtagatacgaggtctcgctatgttgtccagactggtctggaactcctgggctccagcaatcatcctgccttggcctctcaaagtgctgggattacaggcatgcaccactgtgcctggcctgaatattatatccaaataagtgagataggcttcttttgaaatactgtcctttgtttttctttaggggatctgactttttccttctctgtgcttgccgtcattgtgttactggttaccggccagcctgttaaccctgtggatccccacactttgttttacgttgaatagcatttattattgttctttcttactaaacatcccctttctgaagcagagcttcagaaatgatgctcagatgtcactcttgttagcagctggctttctgccttcaagtgatgcattattggggtttcataacagcatttttttttctcttacaaatattaaattatgaagtgcaggaaaccacatgaatgtggtagaaagcaaatgcaaacacagtgttatctggaagtgctagttttgtgattctcctggtgacagtatccttcctgtaatcaacataggaaccctctttacctgtttgctggtggttttctatcctgtatcttcctctccatttatgctgtatgccatggccactttgtcatgctgaatcgggaggtttgattaagacagttgcttggggactatctctatcaaagttctgcctcaccacaaatcctggctgtcacttacaaagtcttccctgaatcctcaggacttcactgactggtctctctctctctctctttttttttttttttttttttttttaaggcagagtcttgggtctgttgctaggctggagtgcagtggcaatcttggctcactgcaaccttcgcctcccaggttcaagcaattctcttgcctcagcctcctgagtagctgggattacaggcatgcgccaccgtgcccagctaatttttctatttttagtagaaatggggtttcaccatgttggccaggatggtcttgatctcttgatctcatgatccatctgccttggccttccaaagtgctgagattacaggtgtaagccactgcgcccggccctgagcagtctctctttatgaacttctatcacatttagggcctgcttcttacagaatgtactgctgtgcattactctgtgagtgtttgccatcagcacaattgcacatgggttgcacatggcttcaaggcaggaatcaaatcacagaccagtgtttcccaagggtggtctaatcccagtacctcctgcttccgaatctcttggatatgtttattaaagttgcagattcagcaacaccaggcttatgaatcagaagttctggggatgtagaacccaggaaactcaccttagttaacttttgcacactgaggtttgagaataactatctgaaaataattgtgcatcctcctctttgcctcctctcccacagcaaagggtccaggtctgagcctatggtaggtgtccaggaaatatttgcttgttgacctaagcaacatcaagccatgagggttgcattccctcttcagttgccaagctttttcaggatgtgaggtcagcatattctctgaacctttagaaacccactttcttccaaatacgtaaagtgttcccctagggcagaggctcttttggaaatctttttttgtctctttatcttttgtaatcactaactctgttggtggtaatgacaggagcccctgactaagattgggatagtggggacatcagctatgaggagctgggctggagcagcaggctaggagaaagatctgaggataggaaccggactgtgctaaactagaagctttatccttggctcccaaagccacacctgctacccttggcagtttattctgagtggtatttctttcagctgttaggcctcgcaggttgtcagttttggtggcagaagagcggtcccgctgctgaaaaggatcaagtttagctctagtggacgcacatcaaagcacctacagtgcacagtggtggattcaggatttgaatccaatgttagcagactgcagtggtgacacttggccctctccttccgtccgcctcttgttccagcaagggcatgcctggtcttggatgatccaggagagatttgcagggcgttgctgcttctggtgcacctcctgaatgcccttgctggtggctccagccctggtagatggaatccaaacagaagaactcacagaagcttagctagcctagaaaggaaccagcgtggccatcaggacatttattagctgttaatctaaccactaccaaatgcattaacacattttttttgacaactttttctcttttatttggctgttgcttagttcagttttgcttggagaagttgtggcaatcctgaattcagtttgtgtgaaaaagcaagcaccttcaagcccagtgttggagaagtatcttctcccaggtctctattcagttttgactaaaggaggtttggcgagcagaaaggtattaccgagtggattcttctcaaattctcatctaagtgaaggaaaaaagcccagtttgctgaagccatgttaagggcacattaggcttttaatatgtgcttcatggagaccttactagattttcctctgcgtagttctttccatctgatgggagcgagggctgtttttgggttgcagaaggcaagagccaggttgtcagctacagaagagaaaggtgccattgtctgcataattgactttgagcctttgtctaaaaggatgtcaggtggaggagtaatgaggggcgagatttttaaaaaattatagagtacaggattttagcaaaatgccagatgttggcatttctgttttggaggtctttagtggtccatgtaaactatttccttgcaagtaaccatccatggtaggaaaacagaaaaaaatgattctaaaagagcatttgtctagttagaaactgtgtcacttgtatcgtttaccgtgaggcatccttgagaggtacatgatttccaaacagccacctaaatcataggtactgcttttggaacagatgtaaataggaaaagcgccagtccagtacccccactaaagaccatcgttagaaagctctcgcagtgctttccagcttagaggagtgtagttcccttcaggtacttaagccagtgttcggtaaagcagcacccaaaatgccttttgttaaatgtgttctaactcgttcctcttgctgatgctatcacaggctaatgattgtctaagtccttcagagaagctgtgtggttttgtatagctgtgagtaaaaccacacccattcaggaaatgcaatgtactttcttctaacaggcatcatcaaaacagatgctgatttacatggtaggtccccttctttagtgacaatttgagagctttgaagggaggcatttgccgtgcatcagaagaaatcagaattaaactggcacacgtgcacattgttggagtaaaaaggaaaagcagtgacctagagtttgttaccgcacatgctttccctgaaggcatctgcaccatcatgatgtcctcatcaactctgcacacacaactagtatttctgtctctttctcttcagagtttaagctcaatgatttccaacttcctcccacatgactccagctggatatcacataggtgtcttcaatttgaatctaaacctgactttgtcattgtcctacgtttatgggctccagggtcactagctcaccatttgttgatgctggacacctcctcttcctctgcttcatccctagctcatatgctggagttctgccttttttttttttttgagacagagtctctctctgtcacccacgctggagtgcagtggcaccatctcagcttactgcaacctctgcttcccaggttcaagggattctcctgcctcagcctcctgagtagcttggattacaggtgcgcaccaccacacctggctaattttttgtatttttggtagagatggggtttcaccatgttggtcaggttggtctcaaactcctgacctcatgatccgcctgcctaagcctcccaaagtgttgggattacaggcgtgagccactgcccccagtctgagtttggcctctttaatatgatagtttacccactcttctccactctcgggcccctgttctgttgcagaccttcagcatcacttgcctggactgctgcagtggcttccaagaagccccttgcttaaagtcttttctttctgtgttccatttattctactcttttgagaattctcatatgaaagaaagggtctgattgaattactcctacacttgaaaatccttggtagtatgtggaaatatggaaaagtactcataatctaatgtgttaaaagaaaaactttagacaaattaaatttaacagagtttaattcagcaaagaactatttgcaaatcaggcagctcctctctactcctttcctcccgaactagaatagattcagggcatttctgacatgctgttgtgtggttggagaggatttatagacagaaaaaggaaaacgacggacagaaaacagaagtgaggtacagaaacagccagattggtttcagctcagcgttcgccttatttgaacagggtttgaacgataggctgcctgtgattcgccgaaacccagagattggtacaagaataggttacagcctgtttacacatccaggtaggttacggttcactgcatgcggagaaacctttaggccaaacttaaaatatggaagaaggcagctttcggctaaacccaacaaatgttaagtataaaattcatatttcaaaattgtgcaaacacattgattacaaagcagtgacaaaaatctatgcctatccacaaaggctagaagtaaagaaaacaagaatgaaggtatttttaatattagggcaattcatgtgtgtgtgtgttttttaatactcctttggtagcaaatgaatatggtgaagtaaaatgaataattgaaaggattttgttagctttctgctcctgataaggtaaaatgtgaatttcactgcatggcctctaaggcccctaggaattccttatcaacttaccatttaaatctcatctcccgtgactcccatcccttccatctctccatataatatttgttttcttcttaaacatactatgtatataataaccatgcacctgtccctgttgtttcttctcgcatgagactcttgttctctgcctggtaaactcccactcattcgttgaggcctaattgaaattcctggccaagcatggtgtctcacatctgtaatgtcagcattttgagaggctgagggaagaggatttcttgagcccagaaagtttagactgcaccattccactccagcctgggcaacagatagagagctcgtctcaaggaaaaaaaaaaacaaaacagaaattatcctcttgctgtgttaccgctattatattgcaattttctgctcatatagctatcttggtaaatgattcatgaagacagaaattgacttatcttaaaccttgtattccaagtgttaagcccattcctgcatataatacagtttaataaatatttacaaaggtaagaagaaaggaaagagcccatttagaaatacagaaataatccttcaggtaagatattaaaaatgtttttggataagcttagtactaattactatttcataaaaattacaaaaatagatgtttttggttaaacagtttttacagtaatagttggattcagcctcacatcatttaaactaaactactggcgtatatctttggcattagaaaattctaacatcagatagaattgcttcagcttcactgtaagccatatttatgaagttactaaaaaccatttttttaaactgttttatgtcatgcataaccatgtcggccaaatcagaaatccaaataaatgacacatccagttctggccacattttgtgaatatctggtatttttttcttaagggaatttaaaaagactgggtaacattaaagggttgatgtaacattttcaattctgaaaggctactctgctctaggaatatacttgttactattttttttttcatttctaagaattctgtttggctaaaataccaaaagagaaaaaaataacttggcttaaataaaatgaaaagtcatctccaaaattaattcggctcctcaaaagttctttccaaaggaaggaataggatgctatttaatattacatgtcaaaaacaccactaaaaagaaaatcatcatttgtacgtgtgacaaggaattcagaatggaattttatgaaggctagtgtgtgaggcacgctgctcacatcttttaaaataatattttgatatcggggaagattatttaatactatatattattttatattatatatgtatgcatatgtgtatatacatatataaaatagagttttttcctattaatgctttagagtcaataagttgtaatggggaatttcagtttgagatttgtcattttttttgcatgatagccttgcccagccttcagttttcttgtttataaagtcatgccaaaaggtgaactgtcactggattaactaattaagaaattagtcagtcactaacatttattgattgaccactgattggaaacattaaatacccacatcattttttagcatttcatgtaagttgatccttgtctgttttgcagagtaaagaaccttagctgaatttcatttttgtctgtcctgatctttgcattcatttaaaaacctgacccttcagctgtttacaagatccatcatgaaatataccatggctaaggtgaatgtgcagactcccagtttccctttagctattctgttgcactagccatggggttgcaaacttttttggtgactgttacagttcattcatcaggaggtactgactatattttgttgcactttcatgagagccagggctcagaagcatcctaagtacctagtgacaaaaactcaggaaggcaattagactatgacgcttttcattacaacctaaggtgcctctcaatatagtaggtgcttatgttgaactgccctctgcagactgtatgtgtgggtccatgtggtgatattgtggctgtaccctctccaaggttgcctagtgttggctgtagcaggaaaggaagtgtctgtaagcaatagtagcttcaatgaggaaggatataaaagagaagtgaactagtcctgaaatcttaaggatctacatacagaccagagtaccttgatggatcccaaagttttattttattttattttgtttttgagatggagtttcgttcttgttgcccaggctggagtgcaatagcgcaatttcggctcactgcagcctccgcctcctgggttcaagagatcttctgcctcagcctcccaagtagctgggattacaggcacctgccactacacccagataatttttgtatttttagtagagagggggtctcaccgtattggccaggatggcctcaaactcctgacctcagatgatccacccgtctcagcctcccaaagtgctgggattacaggcgtgagccactgcgcccggccttattttatttttccagcattattgagttatgattgacaaaatttgtgtacaacacgatgctttgatatacatatatattgtgaaatgtttattatcatcaagttagttaacactttcatcacctcacatagttattttttcttgcatggtgagaacatttaagatttactgtctcagcaaatttcaagtgtacaaatatcattattaaccatagtcactgtgctgtatattcaatccccagatctcaaagatttaaaatctagccctgagacaactgattacagccaccatatgttttcttaggtagttcacaataaatagttataatgctgctgagaaacagtatgatgtgttgaaaagtgtaggttcttgaggcaaacttcctgggtttgaataccgaacttccacttaatggctgtgtaatgttgagcaagtgacttaatctctttgggtctcagtttatcaatccatgaaataagaaaaataaaacaggccaggcacggtggctcacgcctgtaatcccagcactttgggaggccatggtgggtggatcacaaggtcaggggttaagaccaccctggccaatatggtgaaaccccatctctactaaaaatataaaaattagccgggcgtggtggcaggtgcctgtagtcccagctacttgggcgtctgagacaggagaattgcttgaacctgggaggtggaggttgcagtgagccgagatggtgccactgcattccagcctgggtgacagagcgagacttcttctcaaaaaaaacaaaacaaacaaacaaacaaacaaaaaaacctaaatgagtcttgatgcacgtaaagctttcaaaaaatggtagctgttattatcataccactttcatggaatttcgttagttactcagtttgtggtaaaatttttccagtgtttattcttcatgccttcctacaaacttggtttaggaatttacactgttaggggaaacatgtaggtgaacccagctagggaaggcgaagcaatgctgtgggaacacaaaggagtgggatatttagtctgatttgggagtggtgaggacttggaggaagcatcagagctgacttggaagaatggctaggattccacctgacagagctgggagcaaggcattccacacgggagggcgtgtgcccaaaggtgtggagaagggagagtgcagagcagagcatatttgaggaaagctgtggaccagtttgagcccagggttaaggtgtgtgaggtggaacagtgggagactgggaggaagatagtctgatttaatgataatgatgataacggtgagtgtgaactattcactgagtggtgccatatatcagattctgtggttggggctttacataaattagctctgattacaactcccttcaacatagctatccacattttacagatgagaaaatgggattaattccattttttcttaagtggcggagagccactgaaggttgttgaataggagagggtcatgatcactcttagcaggaatttacttatctgctttttcacttccctggagtggtagacacgtcttttgttttgtttaagagacagagtcttgctctgtcacccaggctgagtacagtggtatcatcatagctcactgcatccttgacctcctgagcccaggtgatcctcccaccccaacttcccagagctctggaattagaggcatgtgccaccacacctggctcatttttaattttttttttgtagagatggattcttgctatgttacccaggctgttctggagccctgtgttccagcaattctcctgctttggcctctcagagtgctgggattatgggcatgtgccaccacacatagccttggagatacatcttgcaccatcctgggctccccagaggagtggtattagactgtcagtatggtgaatactccataaatactggtggagtctgttttcaaagcttccttaacaaaactctggaaacatgttttgtacaatttcctttttaaagaagaaataaactggttaagttactgagcaactcctttttgcctgtgcatgtttcatctcatttgatccccataggaaatcttaaaggtagagagtgtaatttttgcatttcaattatatgttattaatattataatggatgaggtcactgggactgaagaaagtaatgctgcttggagatggtaaagctgggattcaatctgtggctccctcacccttggtctgtagtcggccaccacccctccctctattgaacctctcttttattgctgttttccagtctccactaagtatttcttccactggtttaagtccacgttgctaagcaagtacacagttgcttttaaggaaacgaaagccccacaaggacccagtctactttgcagaggttaaatggaaatagattattttcaataatctgtcctcaggaccagaattcttctaaatgatgctgctggcagctggccatctctgggagcccatcagacaaaccacttgtaggagcccagcatcctgcattgggtcagaatgcaaagtcaactaactcttcacagtagatgcagtttgggcgtgagtacctagcaggaaccctagatatttggggcaagcactttgcttcttccatctggtggaacccacgtttattatctaaaagacacatggcaacaggcaatgcagtgtttgcttccaaagacagcctggaatttggaatgacatttagtgaaaggggaaagttcaatttcagctatcaaaggtcatggccagtgaacctacaagcacatattatgtaaatttggcccaaatctgtatttattagcttgaacagttttggagtggttatctgctctacaaaaatgatctaccgttaagagtctcaaaaatatcaagtctgcttgatgcatttaaatcaggaagcgtaaatatttggcatccatgctagtgctgattttcagaggctttgctcacctgcagctgtgctcactttgcgaaaatggacatggtgacctctactttcctggtgagtggccacgtcagtatcatcccttcccgttcctggcaccactctcacccactttggagagccagcatagagcagcacgctgtgtctcagggaccaggctatccatcagataccctactctgaaagtgtccttaatttgatttttaaaatatatataaatatatagtgtgtgtgtatacacacacacacacacacacacaccataaaatttaccataaatttaccattttaacctttttttttttttttttgaaacggagtcttgctctgtcgccaggctggagtgcagtggcatgatctcagctcactgcagcctccgcctcctgggttcaagcaattctcctgcctcggcctcccgagtagctgggactacaggcgcatgccgccacgcccagggaatttttgtatttttagtagagatggggtttcaccatgttggccaggatggtctcgatctcttgacctcgtgatctgcccgcctcagcctcccaaagtgctggggcgtgagccaccacacctggcccagtttaaccatttttaagtgtacaattcagtggcattatgtacatttccagtgtagtgcaatcatctccactatccatttccagaactttttcatcatcccgaacagaagctctgcattcattagacaataacactccattctctcctcccagcccctggtaacctctattgtacactgtgtctctatgaagtttcttattttagggaccacatggaatcatacaatatttgtccttttatgtctggcccataatttaatttttaataacagtgtttcaaatatactgttcttttccaaagtatttgttatcaatactttattatgtcagtaattatcaataagttctcattctaatttcagaaactgggttgtattggaatatgggcatagagaagatacagatttttttttcttcttaataactgaagagaataacatttatcaaacaaacgatcgaactctttctgagacatagtttcatgtgcctctttggagttgatttcccctcactttattttaactcctatttggcccgaattcttctcagaatttctgcaagcaggctcatagtcctgcgttcttctcttctctttttttttttttttttttttggcagggtctcactcttgtctcccaggctggagtgcagtggtgcaatctcagctcactgcagcctcgacctccgggcctcaagtgatcttcctgcctcagcctcccaagtagctgagattacatgtgtgcacgacaacacctggctaatttttgtattttttgtagagacgaggtttcatcatgttgcccaggcttgtcttaaactcctgggctcaagcagtctacccgtcttggcctctcaaagtgctggaattacaggcgtgagccaccgcagctggccaggcttacatttctgtagtgcctgttaggaagagttcagaattttttagacacaggcatagctcagagatattgtgtcttttttttttttttttgagttgggagtcttgctttgttgccaggctggagtgcagtggcacgatctctgctcactgcaagctccgcctcctgggttcaagcctcccaagtagctgggactataggtgcctgccaccatgcccagctaatttttgtatttttagtagagatggggtttcaccatattggtgaggctggtctcgaactcctgaccccaggtgatccacccacctcagcctcccaaagtgctgggattacaggcatgagccactgtgcctggacactcagagatattttgggttcacttatagaccacagcagtaaagcaagtattgcaatacagcaaatcacacaaattttttggttttccagtgcatataagttatgtttacaccatactatagtctattaattatccaataacattttgtctaaacaaaagtacataccttaattttaaaatgctttattgctaaaaactgttaacgatcatcttcattgaaccataatcgttttgttggtaaagggtctttacgttgatggctgctgactgatttagggaggtggttgctgaaagctggggtggcggtggcaatttcttaaaattagacaacaatgacgtttgccacatttattgactcttcctttcatgaaagatttctctgtagtatgcaccattgtttgagagcattttacccatagtagaactttcaaagttagagtcagtcctctcaaacctgtcactgcatcaattaagtttatgtaatatttcaaatcctttgttgtcattttaacagtgttcacagtatcttcatcaggagtagattacatctcatgaaaccactggtttttttgtttgtttgtttgtttgttttgagacggagtctcgttctgtcacccaggctggagtgcagtggcgcgatctcggctcactgcaacctccacctcccaggttcaaacaattctcctgcctcagcctcctgagtagctgggactacaggtgcgcaccaccacgctgggctaattttttgtatttttagtagagatgggtttcacaatgttagctgtgttagccaggatggcctctatctccggaccttgtgattcccctgcctcggcctcccaaagtgctgagattacaagcgtgagccactgtgcccggccatgaaaccactttctttgctcctccatagaggcaactcctcatctgctgaagtttgatcatgagattgcagcaatcaattcagtcacattttcaggctccatttctaattctggttctcttgctgtttccacctcatctgcagttccttcctccaccgaagtcttgaaaccctcaagtcatccatgggggttggaatcaacttcttccaaactgatgttcatgttgatattttgacctcttcccatgaatcaaatgttcttaatgacatctacaatggtgaatcctttccaggaggttttcaatttacttttcccagatccatcagaggaattactttctgtggcaatgatagccttacagaatgtatttcttaaataagaagacttgaaaataaaaattactccttgatccatgggttgcagaatgggtgttgtgttagcaggcgtgaaaacgacatgaatctccttgtatatttccatcagagctcttagatgagtgacgaagtgcattgtcaataagcagtaatattttgaaaggaatctttttctgagcaattaagtctcaacagtgggcttaaagtatttagtaacccaatgtgctttcatccaggctttgttgttccatttctatagcactggcagagtagattcagcataattattagggctctaggatttttggaatggtaaatgagcattggcttcaactaaagtcactagctgcatttgcccgtaacaagagagtcagcctctcctttgaagctttgtagtcaagcattgacttctcctctctagctatgaaagtcttaaatggcattttcttccaatagaaggctgctttgcctacgttgaaaaatctgtagtcaccttcatcaatgatcttagttaaattttctggataacctgctgcagcttctacatcagcatttggagaagatttctttccttaaatctcacgaaccaacttctgctagcttcaaacttttcttctccaagttcctcacctctctcagccttcatagaagtgaagagagttagggccttgatctggattaggctttggcttaagggaatgtatggctggtttgcttttctattcagaccactctaactttgtccatatcagcaacaaggctgtttcactttcttaccattgatgagttcactggagtagcacttttaattttcttcaagaacttttccttagcattcacagcttggctaacccttcagtcacaagaagcctggcttttgacatatgtcagctttcaacatgccttcctcgctaagcttaatcatttctagttttcttatttaaattgagaggtatgtgactcactcttcctttcacttgaatgcttagcggctattttagggttattaattggcctaatttcaatattcttttttttttttcttttttgagacagagtctcgctctgtcacccaggcttgagtgcagtggcacgatctctgcttactgcaagctccgcctcccgggttcacgccattctcctgcctcagcctcccgaatagctgagactacaggcacccgccactacgtccggctaactttttgtatttttagtagagattgagtttcaccatgttagccaggatggtcttgatctcctgaactcgtgatctgcccaccttggcctcccaaagtgctgggattacaggcgtgagcccccgtgcctggccaacttcaatattcttgtgtctgaggaaacaaggaggcccgagaggagggagagagaacagccagtctttgtagcagtcagaacacacatgacatttactgattaagttcattaccttatatggggtgtgtggttcatggtgaacaaaacaattataatagtaacgtcaaagagcactgatctcagatcaccataacagatataacagcgcaaaagtttgaaatactgtattaccgaaatgtggcagaggctcaacatgagcacatgctgttggagaggtgatgctggtggagttgcttgacacggggttgccacagaacttcaatttgaaaaaaaaatgcagtatctgcaaaggacaacaaagtgaaatgcaataaaatgagatgcgcctgttgcatctttcaactgatgtgtcctttcttttcattaaaaaaaaataacgttctgtccatctgcctctgtccaacaacaggcagtcacatgtgatgcctactgttggagaattggtgaatcataggcctccacttctggtgctattactcagagaagaagtatttctttctgcatagaaggaaacattgtaattttactgcagcaatgaaattgtagtagaggtgaacataattcttctatttacatctttaatgagccacaattaaaagtagtgagttggcatgtcagagtgaatgtgttattttcagatttctgttagaacaatggctgctgctggttgaagctgcacttccctggccccttggagctccaaaagccttaagaaagaaacccaggggccgggcgcaatggctcaggcctgtaatcccagcaccttgggaagctgaggcaggcgaatcacctgaggttgggagttcaagaaccagcctgaccaacatggagaaaccccatctctactaaaaatacaaaattagccgggtgtggtggggcatgcctgtaatcccagctacttaggcggctgaggcaggagaatcgcttgaacctaggaggtggaggttgcggtgagcctgtgtctggagttggttccttccgataggtttgtggtcttgctgacttcaagaatggagccacggaccttcacagtgagtgttacagctcttaaagatggtagggacccaaagagcgagcagtagcaagatttattgtgaggagcgaaagaacaaaccttccacagcgtggaaggggacccgagcgggttgtctctgctggctggcgtggccagcttttattcccttatttgtccctgcccatgtcctgctgattggtccattctacagagcactgattggtccattttacagagtgctgattggtccattttacaaacctcaagctagctacagagcgctgattggtgtgtttttacagagcactcattggtgcattttacaatccccttgtaagacagaaaagttctccaagtccccactcgacccaagaagtccagctggcttcacctctcaataccacttctgcatttaattatagccaccgactagctgcactatgatattaatctgggctacttgcttaggaacctgcagatgggtttccataagctagacattgctgcctgataaatgactgtgggatacaggttttcctgatgaggtagtaaagccacatattggaattcatttaacagctcgacaacataatttgtaaacatttctatttagtcacgtgtactcagcaaaaatgtatactaaagtgtttaccatatacttggcattgaagggaattataatgaaatatgttgatcttggtcatttataggtgttcccaccactgtgatgtgtgcatgcattgtgggccaggaggttttatctggaagctagtgacacttcagcgtcaaggcgtctcgctcctgcaggccctttgtaagaccctgtacctaattttatgttgataattttgtgcagtttttttttttttttttttttttgaggcagcgtctagctctgtcatccaggctggattgcagtgttgtgatcttggctcactgcagcctcaacctcccaggctcaagtgatcctcccacctgagccttctgagtagctgtgagcagatacatatgccaccatgctcagctaatttttgtatttttttgtagagatgggggtctcactatgttgcccagttttgtcttgaactcctgggctcaagcgatcctccacttcagcctcccaaagttctgggattacaggcgtgagtgaccatggctggcctttgagatcttttcttaaagaccctaacaccccatacacactcctctaccccttgactagttttataaactgcagacctcacagactggatccacccctgattatgaatatgtttaaactgtgcatatgtatgcattaattaaaacatatttatttctctttcatactagtatgtgaaattccaaaaaatctgctagcccacaaattaggaaaattaaagggctatgcctacctctgccagctgtttccaaggaaatttatatcttggacatttggcagataataatatcatgtttgactgatagtgatcatgtcctaaatttcccaaactgatgagtcacaatcgtgattcacatatttctgggaatcgccccccaacaacttgcgatttgcctggcgtagctgtagtatatcagagttttttaggtgtttagcagaactgaactatatagcttcttgtcccatgccaattcaagaaaattaatttaatagctattttatgaaacattttttcctaactcgacatggatattttaaggtgattttccctgctaagaattcacttgttataggtgactctaattggagaaacagctgttgacttctagtgtgctcaattagtttctttcttcctttttctttttttattttattttatttattttttattatactttaagttctagggtacatgtgcacaatgtgcaggtttgttacatatgtatacatgtatcatgttggtgtgctgcacccattaactcatcatttacattaggtatatctcctaaagctttccctcccccctccccccactccatgacaggccccggtgtgcgatgttccccttcctgtgaccaagtgttctcattgttcaattcccacctatgagtgagaacatgcggtgtttggttttttgtccttgcgataatttgctgagaatgatggtttccagcttcatccatgtcccaacaaaggacatgaactcatccttttttatggctacatagtattccatggtgtatatgtgccacattttcttaatccagtctatcattgatggacatttgggttggttccaagtctttgctattgtgaatagtgccgcaataaacatacgtgcgcatgtgcctttatagcagcatgatttataatcctttgggtatatccccagtaatgggatggctgggtcaaatggtatttctagttctagatccttgaggaatcgccacactgtcttccacaatggttgaactagtttgcaggcccaccaacagtgtaaaagtgttcctatttctccactttcttcctttttcaaagagttcctttattattcccaggccgtcgttaggtgtaaaagctaatttagtttagattattttttaaagtgcacctggcattcaagctatgacatttcctgttgaaacagcactgctatgacctgggaagaaaagatcccaagaaaatataactgaggaatcaaatatttgtctgtataaaaggtttcatattaattcatgataccatttattagtcacttaccttttatgttagtagccataaggaggtgtgatggcatagactattcagggcgaatgacagttgtcatgggcagaaggtgcccatgcatcaggcagagcagggtgaccacaaagtggggagtggccaaatatactttgtcctactcaagacatgagggcctgtcccagtggcttgcttgagaacaaagctcatcctgatgactcagcagccacagtgaagggctgcctgggggctgggggagaaacaagtaggcagatgaggtccagttggaaactaaattgctttgggaggaggagagtggtcacacaatgtaggtttcagttccggctgcactgctaattttgtaaccttgggaaagttaccaacctctctggaatctcagtttcctcccctatgaagaagaaagcagtagcccagatcatccttggaggttccttcccttcagctgtgacattttgcatttgaaagagtaagagaagtcacaggaccatgggaaaggaaaacagaaatgatgtaagggaggcaggtcatggggagggtggtcaggaacacaggttggaagtgcccgtggtgtcaattcaggtgttcggtgatctccacgggcgagtgacttttattgggagaactgtgcactgcctgaggttagggttgtgctctggggaaaccggaaccttgaaaacaccttgtagggagccgcgtttcccttgcacggactgtgctgcctgtgcttccccagcacagtgggcgtcgtcgctttgtgtttgtgctggctgctgtgcggggttgcctgcctccccagcccacacctgctcagccttcctccactcatgttttcaggatgcttttggatgcttctggctacagtggattttccttctccttctgaagcccttttgaaattatttctctgcagattcagacatatttatttatctggtcaatgtcctgcctaaagaatcagataacgactgtgtttttgcctgaactcacacatatgaatgagcttttgtaagcggcagcagcagtgtaggtttagttggagctgtctgagcccttgtcaggttgctacttagttgtttagttagctctcgttgaacttctgtcacatcctcagtttctgggcagtgtgtaagaagagctccttctctctagaccagtggtccctaacctttttggcaccagggactggtttcatggaagacagtttttccacagactagggtggagcgggggatggttttgggatgattcaaatgcatttatattcattgtgcactttatttatattattatgttgtaatatataatgaaataattatgcaactcaccataatgtagaatcagtgagatccttgagcttgttttcctgcaacaaaacggtcccatctaggggtgatgggagacagtgacagatcatcaggcattagattctcataaagagggtgcaacctacatccctcacatgtgcagttcacaatagggttcacgctcctatgagaatctcatgccgttgctgacctgacaggaggcagagctcaggtggtaatttgaacaatggggagtggctgtaaatacagatgaagctttgctcattcgcctactgctcacctcctgttgtgcaggaggtctgtagcccaggggttgggaacccctgctctagagcttaataatcaactggtggagaccagtgcaattgtaaacaaaagtgacaaaacgatagtaataatgccaatggtaatgaaagctacagacattttcagagtgctgtgtctccaagtactgagctgagcactctgcactcatgaaatatgtatcctcctcacacacacacacgcaaaataaatgtttaatggaatattgatcaggaaaaaaacaaccagtaagcaaagtattaatacatgctacaacatagatgaacctcaaaacatcatgtgaattgagagaccacatacttcaatttcatttatatgaaaggtccagaatagacaaatccatagagacagaagttagtttgggggttgcagaggccggaggtgggagaggaatgcagagtgactgctaatgtacacagggtttcttttttggagaagaaaatctaaaattagattgtgatgttggttttacaaaacagtgactatactaaaaaacatttgagttatacacttgagttatatgtaaattaaatcttaataaagctgtttttttaaaaataaatgtttaattctcagaaacaaccctatgaggtagggagtattatcctcctacagatgagaaaaccgaggcccagaaaagaggagaacctgctcaagattacatataaggcatatgtaggattaactttttcattacagagaaatccatggtagtgcttgctaagtaaatgctaaatctattgattgcatggatgccagaactagatggggttagtttagatggattaagggaggaagtggtttaaactgtgttttctaagaagaaagagtagtgattgtataaagaagacaaaagggcatttcaagctggagataattgcttgtgagagttaaacatcaagaaaccagacatctaataggtttgttcaactggagtgaagaatagcctttcatatgacaggtaggtaatcagaagcaagtgaatttagagttatattgttagctgtagtgcgggcttgctgtaattagtagcaggccgacaccttgtaacatctctctggagtgtaaagacatatttctaacagaaatgtgttagtctgcaaagcaaataaggtgcaagcgtaaatgtcctttttccttggactgtctttaccgaatgacatgagcttcacacccttgccttgagctgtcactatcattgcttcactttctattaattagctcggagccttggttctatagtcaacttgaaactgctctggacatatttgctctaatcctcctggacaacctgtgagatgtgccttttcctacacttctgccttgccctggcagccacatgacacactctcgcaaggcaggaacctcagggaggggaggtggcggtgtctgttggcaagtactcagctccctttgaggctgcagatagtaggcattggttaagagtttaaacttgggcaagaactggaagcaaattgggaggacctggaattgtgggtgcttggggaaaaacattacaatgaggactcatatgggtcgtgtggtcatgtttgtttcaagggctttcccttccaaaactggaaaagaaaactgataaaacaaacattgggtggcatttttttctaggcttgtcaatgggtgacttgtttgccgaattaattaaataattaattaattaccttgtttataatcttccttgttttgaaaagatttatggcagtgccttaaatctgtaaatctacccaacaagagaatcttatgaagtaaacaagttaacaggtgaaacatgcctccttttaaatgtttctttataacaaaatgaccatatatcaataacagactgtaacaatgcgtagcaaatgtatttatgtttctcatctattttccactttcaaaaatgtgcttttcccttaaactccaaattgtcttaacaatttcacattttcatttctttcttttcttttttttttttttgaggcggagttttgctcttgttgcccaggctagagagcaatgacgtgatcttggctcactgcaacctccacctcccaggttcaagcgattctcctgtctcagcctcccaagtagctgggattacaggcgcatgccaccacacccggctaatttttttgtgttattagtagcgacgaggtctcgaactccagacctcaggtgatccattcacctctgcctcctaaagtgctgggactacagatgtgagcctggcccaatttcacattttctaggttctgtagaggttcatgtttgtggcatggtaattcttgttttttgcattttttttttcttaacccccctcctggcttttggagcactataaacttagcactggtggggccacatcttgacagcgagacccttacagcccccaaccccgcatcccagtggggcttcatgatctggccctgctgtgctggtggcatggccccctcggggcttaagtgattctgggtcattgacaagaatcttgcctgtgtgaattcaaatcaaaactttggagagcaaagattcagtgttttccttctgcctaacaatctcatggaaagcacagtggtacctagcatttagctcatgtgttcatttagcaggctctaagtcatcttgtcacatgtcatcctcatgtcagctctgtgtggtgttgtcgacccacgagcaaacgttgcaaggtcccctttagggtgacaaggctgattcaggatgtgtctcactgccccaggaaggatgcctctaacatgcggaacatggtgccagtggctgaggggattagttggggaagaagagtgaatagggaaaggaggttgttacatgatccacccctcactggccagagaggaaaaggaaggcatctcattaagagcattagctgtagcctctcatttaaacctcctcactaccccatgaagtaagcattattgcttttgttttacaggtggtgtgagacaaaagtgaaggaatgagactaattaataataagaatccatgccccaccatagctacgatgcagtggagcatggattctaaaccagctctaacatcacatgccctattttcgagcactagtggcttatttctgagctcttctcttcctctttcctgttgatgcttgagttttagttatatcatggcaaattgaaaaattcttcaaaaaacatacagaggaaataaagtggtgggatctgaaacaaaactcttattgattagccattctaatgaagatttgtggctgagatgggagttttgcaatcaccttgggatttcagaaccctgcttttaataattagaactaaagaagggagagtcctatagaagtgtgggtcataaaaccaaggatgtgaatgaggagtggcaagacaggtatcctggagactttatttcagtgagacttctggggcagagttgggactgatgggggacaagtcagctttggaatgatacagaatttttggctgtgacacctgtgtgattttagtgctttgcaccatatcaagagctgagcagagtgtggcaccaatattcaagggactcaaggggcaaatataggtgtcagtgagtgaaagcagatagcgagatttgcaatgcagtgtccaggagtgtccatctttctagacccatttctacttataagatcactgcataccctgtgaaacattatattcatgaagccacagagtttgagccactgtgtttacgctgcaagtggaaggagagtgggcatggagtcagaaagactcaagttcaaatccagcctccataatttatcgtctttaagaccctgggaaagttgacctaagcctctgttttctcagctttaaaacatgaataataatcctgcctcacaggactgctgcacatacggcagtcagcgcagtgccaggcacacacgagtgtcttattagttattattattatcaacaaagagcataggtgatccttcttatcatgattataaaaactgtggcttaccaatgaaagggtccttcataagccaacaaagagacatccctgaaattttcactatagcagaaatgcaaattattactgggtacatttctggcagacacatgagccatttacataatgaaacctctctaatattatttctattaatagcaatacttctgagtatcaatctgaccattttgtatttagaatcattctctctgtgaacagattccttttattgccatgtcgtcttaatatcttctgacaagtatcattatctctttgctgcatattctaatgtttatgattgcatgagttttaaagtgttcatttactacctgagaacctccattttaataatgcattgctttaatgttggtgtttgggaggtaaggttgttgcttattttctcagatgccgattcacagttgagcagatgatgacttgcaggaggctctcttgacctgtcatgctctgatatcatcaatgcattggagtggtcacttctgttagcttttcctccatgaatcccctgttgatcagcccactaagtgactcagcatatgtctgtgcacacctttggaccacattatcatccactcacttaggcccttgaatttttttatgggtatgtgggctatattgctaagtgataaggctggttctgtaaatggacctcgcaacttcagcataacaacggtatggctagtgtcctcctctaggagggactccccttgagggcagatacaggtttttcctgtttgcctcaagagagtcatacaatgcagaagtgcccaagtgaatgttgggtgaatcagtgagtgtaagagggcacccaagggaatgcccacagttggaaggaagttgcctgagaggaggagtcctcagacccattctagctttgtgattctgcccgtacagacatgatttatatgacaggaaaaacatggcaggcccttgggaagcattttcatcttaacctttataatatctaataaatgggcaagatgttaaaaaaaattgccctttccagaagaaggttatacagactctaagaaggcaacattaagaaatttttgaatttttttttttttgagatggagttttgcttttgttgcccaggctggagtgcagtggtgtgatctcggctcactgcaacctctgcctcctgggttcaagcgattctcctgcctcagcctcccaagtagctgggattacaggcgcacaccaccacgtccagctagttttttgtatttttagtagagacagggtttcatcatgttggccaggatggtctcgaactcctgacctcaggggatccacccacttcagcctcccaaagtgcagggattacaggcatgagccaccttgcctggccgaaatatatatatttttaaaaaggttattttcatcccagcactttgaaaggccaaggtgggcagatcacaaagtcaggagttagagaccagccttgcaaacatggtgaaaccccatctctactaaaaaatacaaaaacaattagctgggctggtggcgagtgcctgtaatcccagctacgcgggaggctgaggcaggagaattgcttgaacctgggaggcgaaggttgcagtgagccgagattgcaccactatgctccagcctgggtgacagagcatgactctgcctcagggggaggcggggagaaggttactttcaaccccatgaaaaagtgagcaaaggacatgaacagacacttttcaaaagaagacatatggccaataagaatatgaaaagcagctcaatatcgctggtcattagagcaacgcaaatcaaaagcacaatgagatactatctcataccagtcagaatggctgttgttaaaaagtcaaaaaataaccagttggatgctgatgaggttgcggagaaagggaacacttatacactgttggtgagtgtacaaattagttcagccattgtggaaggcagtgtggcaattctgcaaagagctaaaagcagaactaccattcgacccagcaatcccattactgggtatctacccagaggaatataaatcattctaccataaatttagacacatgcacgcaaatgttcattgcagcactattcacagtagcaaagacacagaatcaacctaaatgcccatcaatgacagattggacaaaaaaaatgtggtacatattaccatggaatactatgcagccataaaaaaggaatgagatcatgtcttttgcaggagtatggaaggagctggaggccattatccttagcaaactatcacaggaacaaaaaactaaatactgcatgttctcacttacaagtgggagctaaatgatgagaactcatggacacaaagaagggaacagcagacactgggtcctacttgagggtagagggtggaggaggaagaggagcagaaaaaacaattattgggtactaggcttagtatctgggtgacgaaaccatctgtacaacaaacccccatggcatgagtttatctatttaataaacctgcacatgtacccctgaacctaaaataaaagcttaagaaataggttattttaaagactatcctaatgcatttgtttgtgtgtgaaatatggttttgctaattagtattctttattgccagtaaaagtaactcactagagggagcttctaagaaacggggattttgatgagggcacgtggatatcccatggattttagggacgggcacggctgggccttggggaaacaaaacaaaacaaacaaataaaccaaaaatcaaaaccaaaaattcacattgaatttggagtttgggtcatattgtatgaacaggactgcttccacctgcattaataggcaaattccagaatactgggtgctgaatgaacagtccagtatggatctgtacggaggctgtaccaaggattggtgtctgtttatttttatttgtgctgctattgaagattttctaatcattagtgctaatattgcaggagaaaataattaatgaaggtgtctactgttctattgtagtaatttctgtttgcagggctcattaacatctttgatcagaatgagcagctcttttctggttggaatagatgaaaattatacaatgtatggagccattcttcaccttgtccttgtttcttcttcatgttgcttcgacttattgctcacaagttgacctcccccttagagctggggtggtccagcagggctgcgttgtgatgtgtattccttttgtgataggagacttgctgagagaggatcctgtttttttgtttgtttgtttgctttgagatggagtcttgctctgccacccaggctggagtgcagtggcatgatctcagctcactgcagcctctgcctcccaggttcaagcgattctcctgcctcagcctcccgagtagctagtatgacaggcgtgagccaccacacccggctaatgtttgtatttttagtagagatgggatttcaccatgttggccaggcaggtctcaaactcctgacctcgtgacccgcccacctcggcctcccaaagtgctgggattacaagtgtgagccaccgcgcctggccgaggaccctgtctttaatgggatgttgggtgatatgtatgaaatggttcaagaagcagatgggaagtgtttgggaggcctactgccagtggctcagtgtagccagggaaaaacagacacacctctgtgccatctctcacatcttagaaggtaacattgagtttgctgcatagaaccatacagttctaggtcacctgaaactcagagctcatgtgatctaaacttctatatttaaaggaggaaagagactcagagaagtaaaaatggcttgaccaagaagtcagactggaaccagaagtggacatatggactcctcattcctgttccagtaccgttgctgccagttcacattgtctttctaaaatagccatttatagggccacagctccatctcaaacaagggcttagtatctgtcagtttgcgaggtctaccataacaaagtaacccagactgagtggcttaaacagcacaaacttattttcttatgattctagagacagtaagtttgaaatgaaagtgtcaggaaagttggttccttctgaagtccttctccttggcttgcagatggccatcttccccctgtgtcctctcgtgggcttccctccaagtctgtgtcccagtctcctgttacaaggacaccagtcatagtggaatagggccctttcatatgaccttattttgttttaattacctctcaaaaggtccaatttccaaatacagttatattctgagaaactggaagttagggcttcaacacatgaattttgagtggttgtggggggaaaaaattcagccagtaacagtatccataagttaacttgattcattagttgattaagtatgattaaaccagctgggcgcagtggctcatgcctgtaatctcagtactttgggaggccgaggtgggtgggcacatcatctgaggtcaggagttcgtgaacagcctggccaacatggtgaaaccccgtctctactaaaaaaacaaaaattagctgggcatggtggtgcgtgcctgtaatcccagctgcttgggaggctgaggcaggagaatcacttgaacctgggaggcagagaggttgcagtgagctaagatcacatgcaccactgcactccagcctgggcaacagaggaagaccctgactcaaaaacaagaaataaagtaaataaataaatattattaaactagattatattggttaccaagtctttacatgaccattttaatagccttttcagatgttaactttgcaataatatgcagccagctaattgaaaattctagtgccataaatgtttttaattgcttactatgtgtcaggcgttgtactaggcactggggaaaactgtaaataaaagagacccagttccttcctttttttcaggttgcagtctatcaggaaaggcagacatttaaaaagggtcttgtgaggactgttatgaaacaggaagtacgagtgccatttctataccttagtacaatcactcgttttaattcacatcttccatggtggcaagtttgcctcagtgtcagccggtcaattgccactcaaggggatcagaacatttatgtatctggaatgcttggtacctagagttctgaagatcactattctcattccaaatatgttttttcattgccagaatgctcactcagtgactggattagttatgtgtactctgcatttttcgaagaggggaaagctgctatttttatcatctagtagcattctgatgactccttgataacatggttactatacggaaccccatctgtttctctgctgggaccacatcttagtcatatttttgtccctaatgtctggcatcgtgcctggcatttagtaggtcttcagtaaatatttgctgaataaatgtatgctgattgaaaaattgcctgctattatcagctctctgtgcatgataaatgccttgcctctccaaagcgattgtaagcttctgagcaggaacaccatggtcacacatggtctgtctaactcagcgccttgtaaataataggaatgccatccctaaatccctagccccctccaggatggcctgtcttccttgcatctgggactgttgaagattcttaatgatggaaaaatcatatacaggttattgcatagacatacattaaaaaatgtagttcgttcagtgtatccctagtgggcctatggccataaattaacttgctcccagggtaggtagtactctcttcttcacttctgctgtaatcacagctgccttcattatagaatcatagagaagtgaattaaggtgaactttgaaagaaggaagagatgcagctcacttgatcgatgtgggagtgggagtgggaagatttttctaggcataaggatggcatcaaagaggcttggctgtttttccattcccagtaatcgttgacagttttttatttaacatttaaaaaagtgtcctccgaaccttaggctgttcaaaaacaagtatttcatggtagagattacgtcaaatgataagcgatgcattctgcgatcagtggcagaaacaaaggttgaagctgcagtttgatgagaatttaaacatacagaagtcaaaaaattcaggagttgaagttaaactgcaagtgtgactcagtcccctcgggcatatggtagtagcattttctgaattgtggcatattcagttaaatttaagcccttgtttttgcagagtcgttgtgtcaaggttgcaatgtgagcagtaactttagactttcacaattttttatattctcacccacagtatgtgctgttatagcatttgtgcactgaaatttggtatagcttataaaaataaaaaaatggtgcaatgctcaatctatggtgcagaatgtatatgattatgaaggaataacccttctgtttgcttgaacccgacctaatactgaaacaaaacaccgccacttttgcttttaagtaaataaataaaccatacattgtggcaaaaggcatacactataaaattgaccgtcttcaccatcaagtgtacattcagtggtattaactgaattcacattgttgtacaactgtcaccaccatccatctccagaactcttttttttttttttttttcttgagacaaagtctcgctctcatcccccaggctggagtgtgatggtgtgatctcagttcactgcaacctctgcttcctgggttcaagtgatcctcctgccccagcctcccaagtagctgggattacaggaacctgccacgacgcctggctaatttctgtatttttagtagagacagggtttcaccatgttggccaggttggtctcaaactcctgacctcaggtgatctgcccacctcggcctcccaaagtgctgggattacaggtgcgagccaccacgcccaacccagaactctttttattttgcaaaattgaaattctacccattaaatagcaactcttcttttcccttctcccccaagcccttggcaactgcttttccatttctatgacaatgtctactctagatacctcatagagggtgaatcatacagtatttgtccttttatgactggcttatttcacttagctgctatattattaataccagctttctggggatataattcacaaactgcagaattgaatggtttttagtctattcacatcggatatgtttttgaagagacagtaaaaccaatccttttttccttagttctcagacacacacatgcttcttatctggcaagtcccgttataaaaatgccatgaactaaatgggaacagaagattgggggaaatatctagattattcttagtttggttcagattaattgagatagccagaatatttttgtaagcatgtttgctttaatttaaatgtcttcattttgcttcctggagccagcaatatgtgattacttattgttgttcttatggggtattgtttgcttgcgtagttgattgtgatgagttggctagaaatttaacagaatggaaatttcttcaagtctggatttgttcaaagaacagtttgaaattgaccaaagcgatagatggaactgacacttgacttatttgagatctggagttcccagtaatgaatattttggtccaagtttgaaaaatggcatttcatgtttatgtactgctgataggaatattcattggtacaaccatttagaaagacagttaggtattatccagttaacaaaaacaaatgtgtataccctgtgactcagcaattttccttctaggtgtttcctagagacttctgtactgtataccacgagacatggaggctctccagcacagctttatttgtgttaataatggtttaaaaaaataaacccaaactacttgaatgtttattaaagtgaaataaacaaattatgatatgatcaaatgacagaacacaatacaacaatgaaagtgaatgatctaaaactatataggagcaatatagatacatttcagtaacctgatatgaagccaaaaaagttacgttgcagaaaaattcaaaatatgaatgattatttttgtaaaatttcaaaagtatgcatcattaaacaagtaaagtggaatttcaccctgagacagttaaaaaaaaaaggctagaagcttagaaagacatggattagaactcgtttttctctgttctgagagtacatgtggaaatgaaagctaccagctatttctgccattttaaatgctcatatgaaatttctaagtaccctgcatagtaagtctttaaaatatcacatacacactactggcaggctaaaaaccaacagaaagatggctgggtaaaaagaaatcatgcatgcagaacactcttacttttaaaaatttacattcctgaaatagaatttttggagagaagcttttcttgaatgatgttagattgaaggatataactaaaaatagaactgcagtctttaataaatgaaaattagtcaagattctaattagtacttcctgtgttcgatactaattttgtcagttcatttctttacttaatgtgggctgtacctattcgcacatcccttgtactctttgcttgtttggttatcgttatgagaccaccaccaaccaccaccaccaccaccatggtcatcatcatcatcaccatctcctagagcacatggttttatgagccctgagctaagctccttaccgtttaatgcaaacatgttcctccctcagggtctttgcattactctaaaataacaccctcatcagtttttatccccttcaccggtttaatttttccttattgcacttacacatacttgtttgtctttctcatttcactaaaatttgagagtgatgttaagtctgtggaagcagagcccatgcttacatctgtcacttgtgtatttccagtgtttaaaactgggcctgtcacacctagaagctcactgatcataatcagtgatcatcaagtgaatgaatgcctgaattagcccaacaactctttgaggtagttattgctgttactattctacagatttttaaaaatggtggcactcagatagattaaactactcgcccacatttacccagcttgtgggtggtggaggctagaattcaaagccagtgtgcctgacaccaaagcctgttgtcttaactactccacttttctgcctatcatctgctgctagttctcagtgactttttatttatttatttttgcatagagcatcttttcttcttttcgggctatcaactcatcatttgtttaattctttgttttttgtttttgagatggaatctcgctctgtctcccaggctggagtgcagtggcacgatcttggctcactgcaacctccattgcctcccgggttcaagcctcagcctccctagtagctgggattacaggtgtgcaccaccacacccagctaatttttgtatttttagtagagacggcattctccatgttggccagggtggtcttgaactcctgacctcaggtgatccacctgccttggcctcccaaagtgttgggattacaggcatgagccgccgggcctggccttgtttaattctctgtatgcacctttttgataaatagttgtgtctccttttagggctatttctgttttgcatatacaaagactttactcatatttcaggttcagccaatttcagcctcttgcagctaacgcccttgccgtgtttagtgctattgtctgggctctgagactgaagcaggtctgtgagagcagccgacaaggtgtcaagaaggaaggatgcaataacccactgagctgcgttatctcctaaatgcatgtgtctttatgccattgctaatggcatctaatgaccttgggctccgaacaggtgctgccttgtaatctgcgctcatttgtctctttctacactgctagatttactgaaataacatgaacagggaaagcaaatgctttcatggatgccaggaatgctttatttatcttttaattttctttcatttgtttcgggatgtagaagcccactttggagttgaaataaaacaactaatgttcagagctgaggttgtcaccctttttagtaggacctcagatctagaaagggccccagagagttctcctttgcttatagaggagagtgtagtcctgtgggaccacatgtggtgctggccagcggagtaggtgggggtcctagaacttatgcagcctgactccctttctggggctccttctgaaacccagtggcatcctccttggcactttgcacacccagctgtaaatacacctgtgccatggagggctaaagccttttgggggggcatatatgggccaactgatgatcaacaacctctgttttcttagatcatctagcttctttatataacgtacctcttcgacttgggttgaccaaactcagatgatctccttaaagatgcatattaaagattgccccaatttcttaggatcctaggatatgagaatcttcatctctctctctctgtctgtgtgtgtatgtgtgtgtgagagagagagagacagagaaatttgtcctaaggaaacaaccagagatgttgaaaaaagatatatatgttcaagaagtccagcacagcatcactaaacgatagcacaatatctggagaattgaatgctagataaatagattatggttggaaattatagttatgttaaatattcacatattctgtgtgtgtgtgtgtgtgtgtgtgtgtgtgtgtgtgtgtttgagagacagagagagagagagagaatatgtatgtgaatatttaacattttgtgtttacagcctttgaagactactgcttttcctctagcatagaaataagatcaaggtttctcctactgtaaaagtttggttgaggggggttattgttttaaaatcaaaataatactaatatataatgagctcttattatggtccagatgctgtactaagtgctttacatacatgtaaaattcaattgccacagcagcccaacagcatagtgttattagccccatttgacagaacaggaagttgaggctcagagaggataagcaacttgcccaaggtggcagatcttaaagtgatagagctatgttttttttttttctttttttttttcccttagagacggagtctcattatgttgctcaggctggcctccaactcctgggctcaagcgatccttgcccctcagcctcctgtgtagctgggactatagtgcatgttgccacgcatggctatagagctatgatttgaatccaagcagtctgactccagggcatgccccagaaattgtttattgtttccctgatcacagaagggatgtatatattcatttagaaaaactggaaatacagaaaagaatgcagagcagatcacgcatacgataaatatgaacatttttagtgtctctagtcatatagattttttaactgggatcatgctgatttactgtttgtgagctagctgcctgatatttaccaggggtctgtatattgtaaacatgctgctgtgtgattttcaagcccacacagtgtgatcttagggcctatcgtaagttttacatcactcatagatactgtaatttccatccataatctatttatctagcatttaattttccagatattgtgctatcgtttagtgatgctgtgctggacttcttgaacatatatatcttttttcaacatctctggttgtttccttaggataaatttccagaactagagctggtggctcaaatagtaaggccctttataaggcttttgatatgtgttattaaattactcttcttgagcacttgccaaccatgacaaagaacgttcatgtgtctgcactctggacaacactaagtactgtaattaaaaaaaaaagaaacaaacaaaaactctgccaatttgataagttaaaaattatatcttgttttaatttgctttttttagtgtagtttcaagtgagggtggatattttccttatgtttctctgttttttacatttcttttttaaattggccattcgtgttcattgcttatttttgtcttagaaagtttttccttttactcacaattacatgtatttattttgtattaaggatattaactctttgtttaatggtattggaaatatttttcccactttgatattttcctttgaattttacttacgttgatttttatttacaaaatcaaaatatctgtgtagtcaagcatattaataattttcaaaaagtgttttgctttttttttttcccacagttgaatcctttttttttttttttttgagacggagtctcgctctgccacccaggctgcagtgcagtggcacgatcttggctcactgcaacctccgcctcccgggttcaagcgattctcctgcttcagcctccagactacaggtgtgtaccaccacgtccagctaatttcttgtatttttagtagagatggggtttcgccatgttggccaggctggtcacgaactcgtgacctcaggtgatccatctgcctcggcctcccaaagtgctgggattacaggcatgagccaccacaccctgcctgaattcttttgttttgtttgttttactttaagttctgggatacacgtgcagaacttgcaggtttgttacataggtatacatgtgccatagtggtttgctgtacctatcaacctgtcatctaggttttaagccctgcatgcattcggtatttgtcttaacactcttcctccccttgtccctccctccgacaggccccggtgtgtgatgttcccctctctgtgtccatgtgttctcaatgttaaactcccacttatgagtgagaacatgcggtgtttggttttctgttcctgggttagtttgctgagaatgatggtttccagcttcatccatgtccctgtaaaggacatgatctcattcttttttatggctgcaatttttttttaatttttttttttgcttttatacctagaaaagccttccattcactagggtcagataactatttacccacaatttattgtagttctttattatctcatagtttatatttatcgtttattttgatgtgcgatcttagacatgaggattcaatgaacttttgtcaaatattagatcagttgttctcacattatgtatttattagtcttttgccccactgagaggagacatcatctttattaagtactaataaaaactaaatgtttttagaaacatgagtatatttcttttttttttttttttgagacagagtttctctctattgcccaggcaggagtgcagcggcgtgatctcggctcactgcaagctccgcctcacgggttcaggccattctcctgcctcagcctcccgagtagctgggactgcaggcgcccgccaccacgcccggctaatttttgtgtgtgtttttagtagagacggggtttcactgtgttagccaggatggtctcgatctcctgacctcgtgatccgcatttctaagccttatattctgttatcttgatatttgttttttttctattttgcttttgattctatgagtttagaagattttaatataattagattctttcatatattttttttcagcatttattagctatttttagtctatttattctttcatgtgtacatagactaatttagtcagattttaaaacatcttttcaaaataaaatttaatttaatagattagatatcaattcagagagaatggaagtctttactgaactcttgtaatttttgatccatgcacaatgtttttcctttagttttttagtaatgcattttctgtttttatagaatctgagcagttcttgttttctttagagattttacagtgttggttataattgtgcacttaatctttattttccttatacagtagtccccccgatcaactgggggcatgttccatacccctggtggattcctgaaactgccagttagtaccaaaccctatatagattgtgttttttcctgtacgtacacaccatgataaaattcaatgtataaattagagattaacaacaataactaataatcaaataaaatacttatataaaaatatactataataaaagttatgtggatgtgatctctctcagtctccaaatatcttcttgtactgtactcgcctattttcagacagcaaattgaccaataaataaaaccatggaaagcaaaaccgtggctatggggagactactgtataagggaaattttcacctgattatcattgcgttttaggaaaactattagtatgtctatgtaagtgtgtgtggaggggtatatgtatatcttctagtaactgaccattatatataattattaatatataatatatataattttatattatacattatataatatattttatataaatatataaaatattttatatatagtatataatatattataaaatatattatatactatatataaaatatattatatatattttttgagacacagtctccttctgtcacccaggctggagtgcagtggcatgatctcagctccctgcagcctctgcctcccaggttcaagtgattcttctgtctcagcctcccaagtatctgggattacaggtgtgtaccaccacacctggctaatttttgtatttttagtagagacagggtttcaccatgttagccaggctggtctcaaacccctgacctcaggtgagccacccaccttggcctcccaaaatgctgggattacagatatgagccactgtgcctggtcaactgaccataatattgatctcagttctagagtctttcagctaattcccttagatattctaagtagacaataacatttccaataatgataattttgtctcctgtattttaatatttttaacttttatttcttctacagcatcctgatggtatgccaaataataatggaagagcagatacaaatacacttgactttattcctgaatttaatttttttttttcttgagacagagtcttgctctgtcacccaggctggagtgcagtggcgcacgatcttggctcattgcaacctctgcctcccaggctcaagtgattctccggccacagactcccaaatatctgggattacaggcatgcaacaccatgcctggctaatttttgtatttttagtagagacggagtttcaccatgttcaccaggctggtctcaaactcctgacctcaagtgatccacccgctcagcctcccaaagtgctggggttacaggcatgagccaccgcatgcagcctgaatttaatcattgactcttgtttttaacttttaatataatattggctactggtttgtggtaggtatcttttactgtggcaaatacatagtattctattctaattttcaaccctctttcccacagaatatttaagagaaaacctttttggccgctttgataatgataatttttgtctattgaatggtgatgctgtgattttcaggatgtatgtatcatggaaactggtagagaaagaaagaactgagatcatgctgaagtatactggggcccaccaagaggtagagctgagtgcaccaattgtcaccaaaatggcaacccgtaaaagagaaccattcttaagaaagagtcatgtaccatcaagcggggatttccagaagcctctgatagtaacagttctcccttccattcctttcctctctactttcaagatgcgatgatgacaaaaagactgacttgtcaaaaaaaccatgaaattccatacaaatgggcaagctgacatatagcagcttcggaaatttccacaatcgctcctctgagttgcctcaaggagaagaaaagtgagagaaaggaagggtacctttgcccccattaaggcacatgtagcatcctggaagctttgaaattacctgtccccaaagttattagaattatgtcattttttggttgttatattatgaaagcctccccacccctaaaagtttgtctataataatttttttgatcaggatttttacttcttaaattaatattaaagcattttaatgtttctagaaaatttgtcatttgtatttatattattttattttatttcattttattttatcaagacagggtcttgctctgttgcccaggctggagtgcagtggcacacgatcttggctcattgcaacctctgcctcccaggctcaagtgattctccggcctcagactcccaagtatctgggattacaggcatgcaacaccacgcctggctaatttttgtatttttagtagagacggagtttcaccatgttcgccaggctggtctcaaactcctgacctcaagtgatccacccgcttcagcctcccaaagtgctggggttacaggcatgagccaccgcatgtggcctgaatttaatcattgactcttgtttttaacttttaatataatattggctactggtttgtggtagatatcttttactgtggcaaatacatagtattctattctaattttcaaccctctttcccacagaatatttaagagaaaacctttttggccgctttgataatgataatttttgtctattgaatggtgatgctgtgattttcaggatgtatgtatcatggaaactggtagagaaagaaagaactgagatcatgctgaagtacactggggcccaccaagaggtagagctgagtgcaccaattgtcaccaaaatggcaacccataaaagagaaccattcttaagaaagagtcatgtaccatcaagcggggatttccagaagcctctgatagtaacagttctcccttccattcccttcctctctactctcaagatgcgatgatgacaaaaagactgacttgtcaaaaaaaccatgaaattccatacaaatgggcaagctgacatatagcagcttcggaaatttccacaatcgctcctctgagttgcctcaaggagaagaaaagtgagagaaaggaagggtacctttgcccccattaaggcacatgtagcatcctggaagctttgaaattacctgtccccaaagttattagaattatgtcattttttggttgttatattatgaaagcctccccacccctaaaagtttgtctataataatttttttgatcaggatttttacttcttaaattaatattaaagcattttaatgtttctagaaaatttgtcatttctatttatattattttattttatcaagacagggtcttgctctgttgcccaggctggagtgcagtggtgcagtcatagctcactgcaaccttgaacccctgggctcaagcaatcctcccgcctcagcctcccaagtagctgggactgcaggtgcatgccactatgcctggctctttttcttttttaacttttttgtagagatggggtctcactatattgctcaggctggtctcaaactcctgccttgagcaatcctgcctcagcctcccaaagcatggggattacaggtgtgagccaccggacctgaccatttctatattcaaaattttgttaacacagtcaaatattacatattttaaaaatttaaaacattctcaatatttgtgaatttattccacttcttatttttaatttggtttgttctctgaaacttaagattagctagcagtaagtcaatcttatttttgtatatattttaaaacattttgtatatattttaaaatatatgcaaaaataagatagacttactgctagctaattaatagccttttaaaataattttttttttttttttttttttttgagacggagtctcgctctgtcgcccaggccggactgcggactgcagtggcacaatctcggctcactgcaagctccgcttcccgggttcacgccattctcctgcctcagcctcccgagtggctgggactacaggcgcccgccaccgcgcccggctaattttttgtatttttagtagagacggggtttcaccttgttagccaggatggtctcgatctcctgacctcatgatccacccgcctcggcctcccaaagtgctgggattacaggcgtgagccaccgcgcccggccaaaataatttttatctcacatttggatagttttatgtgcttttcctttatattgcttttcttaggtttatttccctttctttttttttttttttaagacagagtctctctctgtcaccaggctggagtgcagtggtgcactctcggctcactgcaacctccaccttacgggttcaagtgattctcctgcctcagcctcccaagtagctgggactacaggtgcgtgccaccatgcccagctaatttttgtatttttagtacagatggagttttgccatgttggccaggatggtctcaatctcttgacctcgtgatctgcctgcccgacctcccaaagtgctgggattacaaaggtgtgagccaccgtgtcccacccccttttctaatttattgagttgatcttttatttttaatttttcttaatgataaaaatactaaagatatttgcctctgactgtaagctgcctacactttgatacataattttctcattatctttattgtctcagtctgtgattccataatttattatcttttatactctacacctatttagaagaattctttttgaatgtacaagttaatttgaattgtttacacttctgtctattaatgagttttgttgcattgtggtcacagaatattgaaaggtagtaaaatttattttatgttccaatacaggattcatttttgttaatgttccatgagcccctgtatagaagatgcatgctctaattaaatctaatcaggcttatcttgtcatcagatctgccatatttatgattttatcctacttctctatatctttattaaattttcatctgctggccgggcgcggtggctcacacctgtaatcccagcactttgggaggctgaggcaggcgcatcatgaggtcaggagatcgagaccgtcctgactaacatggtgaaaccccgtctctactaaaaatacaaaaaattagccgggtgtggtggcgggcacctgtagtcccagctactcgaaaggctgaggcaggagaatggcatgaacccaggaggcggagcttgcagtgagccgagatggagccactgcactccagaatgggcaacagagtgagactctgtctcaaaaaaaaaaaaaaaaaaaaaaaaaaaatttcatctgcttatttttccaaggactgaatgcagtggggtagactttaacattattgcatgtctctcaatctctgttttattttctttatatatttccatgctctactatcttgacacatacaattttgacttaattctttggaatgtatctcttgtcagtaaaaatttcacccctgttgaatgctttagatatgtaatactgattttgtattaacagttgtaaaactgtcacttctaaatgtgcagtttcctggtattcctttgccccaatcttcttgtaacttttatgggtttcttgcagatagtctaagggcattcttaatttatgacaccatctgagattcttttgcttttcaaaacgaattaatacctgtcttcaatgttgatacgcttattctaatttttgtcatctttttattcttttggttttatgattccttgatatttccctcattttccattttgtgtgatatgatttactgtctgtaatactcataccttatatttaatcttctagttgtcttcttaaatttgactaaatatgacctatatttctgtatgagcaaagtgaggaagctggctgaccatacctcctccctgtataagataagattaacacattttattctcctttggaattctccttttcttttttaaagttagatatagacatatagatgttttgatccagtttatgattacttttaaatattatgtaacttttcttaataaggattatctatatctgtgttcctttttataacgatattcagttgtttgttatatgctctccttatatgtgtatatatttttctctagagacagggtcttgctctgtggtgcagcctggagtgcactggtgggatcataactcgctgcagccttgacctcctggctctaaaggatcccccacctcagcctcctaagtagctgggactacaggcacacagccccacgcctggctaactttattttttttttttttttttatagatgacgtctcgatgtgttgtcccgggtggttttaaactcttggcctcaagcaatcctcccacctcggcctcccaaagttctgggattacagggatgagcccctgtgctgggcctgaatccatattgtgaactgttttaaagcacaactaccccttttctttattgtttaaaattaaatttttgattgattagggagcttcttcaaatatattctatgaaatacattgtgtttttgttgctccttgggatccaagaatgccttttttattttttaactctcataccttagtaggaaagttggttagtttggaatttttgtatcagaaccctttgccattagagctgtgtagttgttttatttcttctattgtcagaaatctgattttttttccaccttggtgacctggttacctgtatttcttttcctcctcactgaatgcttatgagttgttttgacctcaaaagttgcaccagaaggtaaataaatagatggaagttttctttaatttattaatttatattaatatttatatcagttttcatttttttcttcttgtatagagtgagtttttggttggttggttggttggttggttggtttactctgtatttcttcagtttagaaaaattttctttcattatttctttaataattgcttctgtggtatttactttgactatgcatcaatcatgctatctctatgttggcttcctactttgtctcctgtatccattagcatctatctgatttgtttatacttttcatcttttttccagtgccttttgggagactttttcaggtttgttcttcacttgctggtttgatgctccaaaggctgtttttccttttcattgcatcgaatgtagttttaaataatactttggaaaatcagtcattgaaaaaaaatcctaatttttttttgtaagttggtgtttctttttgttttcatttacttgtcattcacgcctaagtctgggtctcctccccttctttttcctcctccttcttcaaaggtgcaaatcacatcttgtctgaaacttgtttctatttccagtagtaaatattttttgaaatcgtcttcttcctttatttcttggatgtttcttgttttgttaaccaagtccttataagcccaatgttgccagttttgggtctgctcatcattgaatgatgggagggctagcccgccctggaaattgttctcaaataatctctgtaccattagggaaaggttggactcctttcctcggtcttaagctgaaggctttgttcttaaaaatgtactagaccaggtgtgtttttcagcagctgcacaaatttgtagggagctggagccacagggcaatctctattggggttcttccttgcatggttgctgcttggcaatgggtgaagccatcgtgcaagagacagtggttctcattctgaacttctccctgaccctagcttcactccaagccccctttgtagcagaggatgcatttttctggcatcagagtcctgctatgtagagagacatctcacatcccaccagatggccatgggcatggaggacttatgcttggttctcttcttagtgccttccgaatgtgaatgccctggacaccagacactatctggtttgctagcctgctctcacctccagcgttcagtccattttaggaagatttctaaccagtgctctgtcagaatctcttcttgtttcttctcacagtgctgtgccaccttttcaagaaagagaatcccaacacacatttctgattcagccttttatgtgatgctttctctggtctatctaacaaaatgtcttaatgttaaaaatgctgggtgccctccttttttttcagcactggtgtagacttccccccatctttatatttgtgggaaatggatgttcagattgatgacgtgctctaaagacagagaggggaaatttacaaaacacaaatggagaggaatgtgaattttacaaaagtatttatggagttctctaaataatgaactccctcaggacacttagcacaccaagtaatgtaaaaagttaggcttacacgtagattgtcagacacacagcttttgtatattgtaagctacacctgtatccctgtaatggtccccaggagtatcacgctgcatggtccaattaggtacagaagaactctcaagtagcagccagtcactttgcctgtaataatgtttatgattcagagtggtgcccaattcaccctttgcacttttcccagtggcatttggcagctggggcctggttattcagcagattattgcttctccccagaagcttttgtgatccttgcaggcgctctcctactagggagagaagaatgccaacatattttaaggaaacaaagaataatagtgtcacacgtctttgaataagagtgaaaaaatagttctccccacatccaaacacagtgtagtcaaaattaagaagatagaaatcaagtgtgcatgggcagagggtaggtcataggcttaatgaacccagaagagctttatttattgacttctattttatcccttctcactggtccagctgcaatgattgtcaacaaaggtgacttagaaaaagagagaccttggagagagacagaaagagagagagctggataggcagacagatgtagagcaggtttgtttgcttggcagaacatccaagtcgcagatggttctagaacagaggtaatattgccagggttgcgtggaacagatctggactaaagctgaggcttgcaggtaaagccagtggctcccactccaatgtcattcagcacatagcaatttcagctggagatctgtttatagcataaaacagacactgcagacttttttctccatgagactttaatgtttcatttactaacaagattatatatgggaagtggatgtcataagaagactgtagaatcctattgtctcaccaccgattgaggggcctttgtctatagaccaagcacgtctttttcctcggatgccttgggcatttcagaccatgcccaaaaagatatgttgtgacctgcagacctgtggttgaccatattaggatctgtgatcaatttcttagagattttgggcataaaaaatgagcaaagagccatctttaggaatttggggatatgcttgacccaaggtatttttgttttctactaacacattttgatgtaaagcaagaagtggttttcaacagttgaccatggttgcctagagagatgggtacatattcatgtattttgacctatcagatggaaacaggcttcactcttagaacttccctttggatttcccacccaccccagacactgacattccattttgaagttacacatgaatataacactgacacattgggacatgctttccaagctcaattaccatgcagcgcaatatcaattaagtggatcatgaaacatgtgtctgattgtctcacttgcataatttacattttttgacaacacttaattctcccttatatgtccaggtttcctattttgtgatgcacataattgcagaacttgggagctagaatggaccttggagaggtcccttacgccaaccctttcacttcacagatgtagaaactgaggcttagagagggtataactttcccaaggccacaaaggactagtttacagcagagctgggcttatataacagggctgcctggccggacgcggtggctcatgcctgtaatcccaacactttgggaggccaaggcgggtggatcacctgaggtcaggagttttaaactggtgaaaccccatctctactaaaaatacaaaacattagctgggcatgttggcgcatgcctgtaatcccagctacttgggaggctgaggcaggagaatcgcttgaacccgggaggcagaggttgcagtgagccaagatcgcaccattgtactccagcctgcgcaataagagcaaaagtccgtctcaaaaacaaacaaacaacacacacacacacacacacaactcatggaactgtatactttcccccaaaattcaatttagggccgggcgtgatggctcatgcttgtaatcccagcacttcgggaggctgaggcgggcggatcacgaggtcaggagatcaagaccgtcctggctaacacggcgaaaccccatctctactaaaaatacaaaaaattagccaggtttggtggcaggcgcctgtagtcccagctacttgggaggctgaggcaggagaatcacttgaacccaggagtcggaggtcacagtgagccgagatcgcaccaccggactccagcctgggcgacagagcaagactgtgtctcaaaaaataaaaataaaaaaaaaaacccacaaacaaaaaaaccacaaacaaacgaacaaacaaacaaaacagggctgcccattatcccctgcatggctccagagctattcttaagatcctctgcactttggatcttaagataacattagatttcatagtatccatgaaataacttagacctggtcttggaaatacgtttcaccatccaggtacccatcacatgtgttcgcaggtgaggctttcttagcagcactatgtaaggagacatagtaaagaaatatttattgaatactgaatattgattgagcctatgtcctgtgctaggtgttctaaatatagaaccttatctcatcccataactctttgagttaattgtcattctttttgtttgtttgtttttgagacagggtctcgctctgtctccagagtgacacactgtactccaggctggagtgcagtggcgtgattgtacctcacagcagccttgaactcctgggttcaagcgatccccccacctcatcctcctgagtatctggactatatgtacgtgccaccacacctggctaattttttaaacattatttgtaaagttagggtctcacatgtttcccaggctggtcttgaactcctgggctcaagtgatcctcccatctcagcctcccaaagtgctgggattataggcatgagacactacacctggtcagtatcgttatcttggccattttacggttaagggaatatagacccggcaagtttctatagcttgttccagaccacatagctagtaagctttgaggctcatcctagggtcactgcttgaataacctgcatttttctactgtaccatatgtattctcctgctaatcttcttactgagagagatggtagttcttctaagtatcatatgatccaaaagttgcttaaccaagagctccagcatctgaatccctgagcatacctcttcccccatgcatcatacctgtttcccattctctttgaataattttgaattgtgagcaaatgttcttacaaaataaagaagagagtgtgtccctgcagcattgtctaagtgcagaggatcttaagaatagctctggagccttgcagggctcatgggcagccctgttatataagcccagctctgctgtaaactagtcctcttgtggccttgggaaagtcataccctctttaagcctcggtgtctacatctgtgaagtgaaagcgttggcgtaagggatctcctcaaggtccattctagctcccaagttctgcaattacacgcatcacaaaatagggagcctgaacatataaaggagaatttagtgttgtcataaaatgtaacttatacaagtgagtcaatcggatacgtagttcatgatccactaaattgatactgtgctgcatagtaattgggcattagtggaagcagttcacgtaaaagactataatttgtattacttttacaccattgcaacactttttattgttcctcagtccttgatttgttttctaatgtctctagtgtgtttaacactttctcttgttatgatatgcaccatacatgtgcatgtaatataattcacatatataacatgaaaacatctgattcccacatctaacagtcagacttccgttttcctcttttccaaaatccaggtggtcagctgggtgcagtggcttgagtgtgtatttccagcactttgtgaagccaaagtgggaggattgcttagggcaggagtttgagactagcctgggcaacatagtgaggcctcatctctacattttttttttttaatcagccaggcatggtgatgtgtgcctgtggtcccggctactcagaaggctgaagtgggaggatcacctggttccaggaggctgaggctgcagtgagctctgattgtaccactgcactctagcctgggcaacaaagcaagcctgtctaaaaaaaaaaaaaaaaaagaagagaaacaaaatccagttgtctgaagaggaacaacttcttcctgagacattttctttatttcttttaattttgttttcttttttttagatacagggtctctctccatcacccaggctggagagcagtgatacaattgtggttcattgcagcctcgaactcctgggctcaagcaatggtcctaccacctcagtcagttgagtagctggaactatagatgtgcaccacgtgccacgataatttttgtttttttttttttttttgagacagagttttgctgtgttgcccaggctggtcttgaattcctgggctcaagtggtcttccctccttggccttccaaagtgctgaggttacaggtgtgtgccatgtgcctggcctgttcctctttatctctttgtattgagaggttcttgagaagcatttccatctgctttccatcgttttctcccatgtgcagacttggttaaaagaccttgaggaatcccccctttacgaagccttatccatgagaggacaagataaggagacccttggtttgtggattcagcttccatggtcattcccatcagttcccaccacttctaggagagatagtatcactcgatgctgacctggaaaatcctggtagagacccaggaactcataggactcggtccccacaccctcatgccagtacctgtgtgacggagaggcgcccctttgcatggggtgctgcacaatgccttcgtcaatcttctgccactgtcctcatccccaccccagcctgctcacctcttcccctgtaccccacagccaccaggccagtttcacctggtggaacacttcccccacttcacctgctgtgcctcacctacttcctcctgcctgttctggtgaagcctcccgcgtcttttcttgtggtaatgctcttttctgcctctctaaacttctgccagtgtttttgtatttgatttttgaaattcaactcagacctccaaatgaggcctaagtcaagcctagcttttggcgagctcaccccatttatggtgggggcctgcctggtcacctgctcgtcttaaaacctgcctttccttatggaactgtgttttcaatgaggttctggccgctaagcactcaaggctgtgtacactcaactgttgggctgttggaggtctccccatgagaactttattacagaatggagtatggagcctggaaagggaaggtggcccagtgaggaatggtactgcattctcagtctctgggtgagttgaggcaggggaccagaaggagaggagggaggagtgggaaaggcttaaagcctcttggaaggagaaaagccaggggaaaggagaatggtaactgggaaatgggctaacctcagacctgcctttagcggacgcctggctcgagggcccaagacctcaagctctcagaaactggtaagaatcatgctgtcccaggtcccagtgaggtgactctaggtaggaggcccttagcagaggtggctgggtcaatcccagtcggctgcttttatcttttattttatcggcacttagaaagaaagtatggtgctccttctgagagggctctttaacattgcaatgggccaatcactttatatcattatctcataattattatattacattacattatattatgataattcctgttttgtaaatgagtagccgaagctcagttacatagcctgtccatggtcacagtggaacatgaacccagtttgtgatgtcaaagcatttctatctttatggcaagccttcataggaagcaaaagaagcttgcaaaagtaggagacgttaccttatcctctttccccgttcagaatttgggctgcggccaggctcagtggctcacgcctgtaatctcagcactttgggaggccgaagcgggtggttcatgaggtcaagagatcaagaccattctggccaacacggtgaaaccccatctgtactaaaaatacaaaaattagcagggcatggtggcctgcgcctgtagtcccagctacttgggaggctgaggcaagagacttgcttgaacccaggaggcgaaggttgcagtgagccaagatcatgccactgcactccagcctgggtcacagagcgagactccatctaaaaaaaaaaaaaaagaattttggctgctcactgatgttagaatttaaaagaaagtaaagtgatgcttcaattaaaaaaattaaaagcttaaaaaaattaaaagctttaaagtatggattttttttggtgggcggagcaaaaacagtgactgaagtgtattcatattgaaacactgtggtgtttcactggtgttcaagttgacagggcaggggtgggaaagaattacggagtagaaacccctggggcccaatggggaggcacctagagggcctaaggggaaggatcctacagatgaacttgaccttctttatgattttgcggaagacaactctgcttatctttcctctgggaccagtaaaatagctgttgggggcagatgctttgctgatgcttagtatacaaaagacagcttatatgggggcaatattaattttcttaagtcccttggcatggattctgaaaactttaagatttatgatttgagaaccctgactctaaaatacgtgagaattttctgcttgcaaaatagattacgcttgcacaaaatacgcttgcacaaaatcttctacttgtatttctactctggattgttgaaacaaattgattttttcttttttgagacaaagtctcactctgtcatccaggctggaatgcagtggtgcaatcttggctcactgcaagctccgcctcctgggttcacgccattttcctgcctcagcctcccgagtagctgggactacaggtgcccgccaccacacccaactaatattttttgtattttttagtagagatggggtttcaccgtgttagccaggatggtctcgatctcctgacctcatggtccgcccgcctcggcctcactaagtgctgggattacaggcgtgagccactgcgcacagctgaaataaatagattttaagtggctggctggctctcagattgcatcctgttagaaagtcagaatagaaaatagatgcattttagcagtgttggaagaataaactcaaagtcccctggaaatcctggaccccacccacctcttaccaagtatccagcaggaaccttcttccttactattgttataatacattctagccccagtaatttgttccacgtatctcattagagtgaagatagcaacatacttaaataagaatttcatttttcagttttagcttttgatgtaggctaaatgctctgtgtcacataacttagactacctacatgcctcatacactgataccctattttgaaattacacatgaatttaacactgccacgttgggacgtgctttctaaagttacctatgaaataacttagatccggtcttggaaacaccttttaccagctaggtacccatcacatagcttagtaggtgatggtggggtccttcgtttttttgactacccgtataatttcaggagcaagcctaattgttatgcctcctttgttattacctcccctagcctagataacatgccttccaaattgtattgagagtacacaggaagacaactgcagcaggcaaccagctctaacaactgcgtcattttctaagaatcaaaggaattacttgagtttctagttctggctttggcttgccagacatataccttaccccagcgaggtaaatgattcaatcatttgggaatgattgaagttgctgcctaattcataacttataggtgattaaacttgtaaagtattttgaggctgtttctttcattcatttattccaaacaaacatttgttgttgaatgggtagtgactttgattttaaaacactatacagacataaaatagtggcagcttgtagatagcaattttttaatttgctgtccttaaggaatttcgttaccaaatcctcacgaatcttgaaccttagaagaataatcctttcctttgttggagttttaaatttagaataatcagacaatagtgaagcattctgttcaaagcattccttttaggctacccatttattatacgctgctcttaagaggagatgaatttgattagcattgaacattcagtcagtgtttttgcatagctaatatcacggagaaattttcaaaaaaagttatgcctgctatttaacattattatacagtcaacttttaattatctgtattaatggaatgtaatcagtgatgtgttgctccaaaatcatttcctttggctttgagaagcaccggatgatgcttttattggtttgtggttttgcttagatagtattaaaattgtgccacatgtgtgcacatagctcatcttagggaggaagtagcccaaaagtatactgggggctagggaaaggtcaactggaatttttaaacctaccacagatacatatacaatggatgaccccaagattattcatcttaattattaaataaaaaacaatggccaagaattatataatggcagctgtgtaagaaaaaagacgcaatgaaccacatgtgagatttccatgtaggacacacattgtttcccacctttcccttttgaaatttcctgaaagtgaaacactctcataacactacagcagtgaacactgttagatttagtgatcctccaaatgcattttgctggtgctccaaataggcctcttgggggaacagaaggaacagaagggctgatgtcttgacatgttaatgtttctagataatgtcacctttaggtgtgatagctgttactgtttattattttttaaataaccctcttgttcccattcattcaagttaagctttttttttttttttgagacggagtttcactctgtcaccaggctggagtgcagtggcgcgatctctgctcactgcaacctctgactccctggttcaagctgttctcctgtctcaccctcctgagtagctgggattacaggcacgtgccaccatacccagctaatttttgtatttttagtagagacaaggtttcagcatgttggccaggatggtttcgatcttctgacctcatgatccgctcgcctcagcctcccaaaatgctgggattacaggtgtgagccaccatgcccggcctaagcttgttttttttttaatgaataacaatgatagaaggaaatctttggagggtttatcttcttagtagcggcctttcaaatttcaaaagtcttctcagtgcacaaatctgtttttgcatgaggctgctatagggccagcacttttagtcctctgtggcctgttcacctgagtgagtggtgacatttcttggttcataccttggaaggcaatgatggctggccctttagagtgaggtgaaggaagactgatccctgggtgtggaggtactgatgcataggaaaagaaaacatctttggtgacaccattgggtgtcagatcagtttttggcaagttggcaggaaagtctccaaatcagtggggtctggctgggcaccagcaagttggaagctgcattagttccttctgctggcatgtccccctgtcatctggccatagcctcatctgctcctactaccttgcaggtgcccttggggtaaagctgtccagatgcacatgaacccctcctcttttcagctggacaccaagccaggaaaaggagaggtgtgactttttgacggaggccagtttctatgtcagcagccttgccagtgaacactgcaaaatggtgtcagcctgcagcctttttgtgcactggagcagagctcccctcaccacatttgtgaaacaggttctgtcatggggcccaggtgtccttttctcctgccacccccactccagcttgctggccgccttatcattccacaccaggaagccagcatccttgagttgtccttacttcttatgacctgctgtgtagaaagagaggggaaaaccagtgtccgagtggctgctgtgggtgtggtctgggccgcgtagttttatatacgtaacaaccttctgagacaagcgttagtgactccttttacagcggatgaacttgagggtcaagccagtaaataatttcctcaaagtgacagagctggaaagtggtaaagttaggatcaatactcggctttgattttaaaatatgcatatgcatatattttggagatctggatataccacttccaaagtagcatattatactgaaatttcaaaagagaaaacatctttaaacaaaaggaaataactcttaattatggagtttcaggtatcaatgtgttgctggagggctgtgatcttaaaagcatgtcacattggcaacccgttccggcaggttgtgacaagctatgtagcatgcatgaaagcatcattcattttttaaaaaatgtcttcaccatttatttctttaattttttgttttaactttttatatttataggcaataattatgtatatttatggggtacagtgtgatgtttttataatgcatacattataacaagattcaatcaagctagttaatatattcatcacctcaccagtttatcattttgtgtgtgtgtaagaacattaaaaatctgtgttagcaatttacttcattcttaatggcagactcagcttctttttttttttaaatcctagactgttggcttctccttccagcagtgttgtaggactcagctgcctttctttgctgtccctggccagagatgtgtgcactcctggtctcctaataaaactttagcctatgctgggagccatggatttggcagcactgcctttagcatttaggaatatgtttctccttacatcaagaatagttttaggccaggcatggtggctcacgcctgcaaatcccagcaccttgggaggccgaggcgggtggatcacctgaggtcgggagtttgagatcagcctaaccaacatggtgaaaccccgtctcgactgaaaatacaaaaaaatagccaagtgtggtggcatgtgcctggaagcccagctactggggaggcagaggcaggagaatcgctagaatctgagaggtagaggctgcagtgagccaagattgcgccactgcactccagcctgggtgacagagcaagactctgtctcaaaaaaaaaaaaaaaatagatttatgctgcttgttgaggaccagcagtattctcaaccatgtgaggcattcttcgaacatgtgaagcagcattttcctggatgggcatttctgccataattgtgggcagaaaaaggtgtggtccacatatgcccaacagggccaaggggcaagggtgagcatgtacctatgtcttataccccggagattcttgcggctgacgaggttcccttacaaagcccaaaggaattctcctccttccaccggaggtgtttataacctctaatttgctcaccatgcttctagtggaaggagtaggagctcaatcccctgggaggctgcggcagagccagagcaggctggtgacccagagcagtggcactcccctctgagtgcatgatgcagatggagcaggagggggatgcaggtgggacaccctgcgccctgcaggtgagtgcacagccagcgagacacccaatcagggagcaggaaggctgtccctgtggcagcaggtaaaagagagagtcgctgagatgaaattcgtgggtgtgtgcttcagcttgtttgaacagctcctgtgcaagatcttatagtaaatgctgagcttctttgtgctctgtgcctgtcggtggaaggcatagcccttgatgaagatttctccttctacccatcttgcctttggaaagggctcccctttgacaaatgctgctgtagtatttgatgcagcctccatgaggtgctttgggtgggaagtggattctgacctcatttcccagaggaatttgaagtggaggggaaggactaattggtccctcattaaggacttacaatgaagtacagtatttctcctgaaaggataatctaagtcactggataaaatgcccaacacacttttaacgtgacataggaatccaaagtcatttttaaatcaaagatttttgtagttgtggagaatggctgtgttttaatgggatctttacatatcagcattacaaagggctccttcaaatgtgatgattttaatgtttttgctggggtttcacctgaggttccaaatacatatttccctatcatatttgcaggcatccagcacccgattttagatatgcaaatcagctcactttgtttaccaggctttggataggggagaaaaggaggtctgaggctgggcacggtggccacacctgttatccagcactttgggaggccaagatgagaggattgcttgaggccaggagttcaagatcagctttggcaagatagagacctcgtctttacaaaaaataagtaaaaattagccaagcatggaggcgtgcatctgtagtcccagctcctctggaggctgaggcaggaggattgcttgagcccaggagttagaggctgcagtgagctatgatcgtgccattgcacagcctgggtgacagagctagattcagtctctgaaaaataaaaaaacaaaataacggggctgcaaaagcttccttgacgaagaaggaaagtctctcgctcctgtttaacactgcctggctgggttccagctcactagcttaaaacgagaaggcaccaccactgtgattaaaataaggccctacttaattaaaacagtgtgagaatttaataagaggcataagacttcactgatagtcaccaaaaaatctcaaaaaggtgacttaacaggcattaatagcatatgttgcttgtttactctctgtcaacattccgttttccagagacatccttcgtacaggtgaaagtctctcattcctccctctcccctcactgcctgcctttcagccatttccttgctttttgtagttaaccagtaagaaagagaccataatggagaaagaacacactgactgtgtttcacagactgttgccctcatctccacttgtgttaaagaaggtaaattagttcccctccagattaacttcagcgtcagctgtggtgctttcctgacacttcttaacatttgaacagtaccacattctgtccgttttatcgttgtctcttctcataccctgtatttgccaattctgtactcatgcccagacagatctataggtatatgtaggaggatgatgaagaacgggccgattcgtagctcaccctttgagccaggaccaaaggtttgggagtcttaggctctgaccttattcttttggagaggaaagaatcattttcctttaagcctaagtctggcaaaatctaattacaaagtttttcgattttgctattttaaaataaaagctaagccttccccccatctaatcagccctctcttcctctgcttctaatagtgaaggaaataaagaagtctctcaatttcacaagcttgaggtacttatatttgtacatgatttcctgttctaagtgggtggttttggcccctggcacttcatgtacgctagggcatttttggacacttttggtatccaccttgcttaagaattgaatgactaggaaagaaggtcatggggagtcttcaaattattaaccctcagtccaatctaagtcattagttaatgccatgtttgaaggtggtaaagtaaccgtcatcttacgaagtaactctcgtttgttatgcttagtgctgaacaaagtataaactcaccaatgtgagagacagggacaggatgcttatttctttatggatatttagaatttgagcctgtaggctgggcacggtggctcacgcctgtaatcccagcactttgggaggccgaggcaggcggatcacgaggtcaagagatccagaccgtcctggccaacatagtgaaacctcgtctcttctaaaaatacaaaaattaggtgggggtggtggtgcgcacctgtagtcccagatactcgggaggctgaggcaggagaatcacttgaacccaggaggtggaggctgtagtgagccgagatcgtgccactgcactccagcctggcgacagaatgagactccgtctcaaaaaataaataaataaaaaaaaaaaaaggaaaaaaaggaatttgagcctgtaacaccaacttcagcacaaatagatctctttcttgattctgaaatgatttatcagttttaaaaaatggtggggtgcactgctggtgggagtgtaggttgatatagtcatttgggaaagcaatttggcactattgtttaacagtgaatattcatagacccattcctaggcaataacccagggaaacttatgctgatgggtattgttcctaatggacacagcattgtttctaatagaaaaaaaaacgaagctgaaaaaattttaaaggtcgtcaacagacatatatatatatattagtctaatatatgacaattagactaatatatatattaattagactaatatatattagcttctatccctgtagactaatatatattagtctaatatataataattgaactaatatgtataatttgactaatatgtatattagcttctatctctatagacatatattagtctaatatataataattagactaatatgtataataattggactaatatatgtattagcttctatctctccagactaatatatatatatattagtctattgagaacctttatatatatatatatatatatatgcacacacacatatacacgtacatacatacatatatataattttttgcttcacagaatggaatattatacagcagtgaatatgaaggaactatagtagctacctgtaacaacatggctaaatcttagaaacaatattgtgtgaaaaaaactagtcacaaaagactatatacagtatgatagtattataaagtttaaaatcaagcacaattaaactatgtattttagagagtgatagatagaaaatttaagatagtggttacccctggagagaaggcaggaggatggcttagggaaatagcaaataggtagatggatcaaaatacccctaaatgtctagttctcaaatagggtggtcggtgtatgcctgttcattttattcttatgcttcacaggttacgtacatgttagtgcattcttttgtgggttacaaacattgcatgatagaaatatttttaaagtgatagcatgtcagaattatggcttgttttttccatctctatttcctaacattctctttccatagtccccagggagggggcttgagatcacacaggagtaattagaaggtctgcttctgacagtgtcgctccttgagtggtggaggttttagggggaggctgacagtaactactgagtggaattgagaggtgaagccagctggacttcctgggtcgagtggggacttggagaacttttctgtcttccaagggtattataaaatgcagcagtcagtgctctgtagctagcaagaggtttgtaaaatgcaccaatcagtgctctgtaaaaatgcaccagtcagtgctctgtagctagcaagagatttgtaaaatgcaccaatcagtactttgtaaaatggaccaatcagcagggttctaaaagtaaccaatcatggggaggattgagaaaagggcgttctgataggacagaaacaggacatggacgggaaaaataatggaataaaagctgccccccccaaccccccacccccacccgcaccagccaccagtgcaacctgctcagattcttttccagctgtggaagctttgttctttcactctttatgataaatcttgctgctgttcagtcttttgggtctgtgccatctttaagagctgtaacagtcaccgcaaaggttagcggctccattcttgaagtcagcgagaccacgaacccaccagaaggaaccaactccagacacagaatcagctaggagacgtgggtgctttctgtatagtgcttcctaccaaaagcctagaaaatcttggggcgtggagaaaagaaaatccatcaagtaaaggcttgatcacctcttggaaaacccatattcattgtcccaacagtgactaatacgtctaactgtgggcctgggtaggatattatgagaaacctgttcttttggtgcccacctttcttttctgagcaacacgtggtcttctgagtgaggcaggagtccggcatatgcgtgatgatgtaatatgttaggcagccaggccctcaccttttcaaaggttcgatcttgaaaaatcaaaggtggatatgtgagaaataagcccatataggaataagaatgacaatggaagtggaaaatgtaagttgggactgatgttctgctgctttgagtactgaaattctctgctgctcggattcatcatcactgaagtgctggccagtactgggaggggggcagagctctcccgggagtcgtcgcttattctgaaacagctgagcagaataatgagtgacaggctggtggtggggaggttgagtcttactccggatttccattaaatgagtgcatggaatcaatagctaactgaacatttgtctttagaacacccaggggcccctggggaatttggtattttcagtctaattctcagacaggaaaatgcgcagcatgactattttttaaaatagtttcaacatcttttatgtaatgctgatgcatctggaagtgaaaacgctaagagtttcatttcactaaaaaatggattttttttggctttaacctttaagttgaaatcacaattagtggccttttcaccatagtcataagagtatcaaagtgtgtgtattcacccacacatcaaaccagtgtttactgagagtatattctgtgcaaagaattgtgcagtttgttatgaaaaatacagagacctcgctggggcccctaaggagctcatagtctagaaagggagacagatcattacacggcagggaaaatacaatatgtatgggagcatgtcacaaaggaagtgacatcgagctgaatcttaaaggaagagcaatgcttgaatgaatgaggacatccctgattgaaggaccagcataatgaacaaagaattttgccttatattactaagattccatcagatgttatgacgcaaacataagcatcatggtaatgaaattaatagtaaatttaaataaaaatgatcaaattaagacttttttggttttgtctattctaccttctcattttaattatgttgcaaagaaccatatacttagggtaaactggtcaatagctgtggccatggaatagaattataattcaatttaaaaggagtttaatagtctcatggtaaatgaataggttacagctgggcactgtggctcacacctgtagtcccagttctttgggaggcctaggtgggaagattgctggagaccagtagtttgagtccagcctgggcgacatagcaagaccctgtctctactaaaaaattaaaaaaatagttgggcgcagtggctcacgcctgtaatcacagcactttgggagaccacatgctggtcgagaccatcctggccaacatggagaaaccccatctctactaaaaatacaaaattagctggacgtggtggtgcatgcctgtaatcccagctactcaggaggctgaggcaggataattgcttgaacctggaaggcggaggttatggtgagtggagattgcgccattgcactccagcctgggcaacaggagtgaaactatgtttcaaaaaaaaaaaaaaattaaaaaattagccaggcatggtggcgtgtgcctgtagtcccagctacccaggaggctgaggtgagaggaccacctgagcccgagaggttgaggctgaagtgagctgtcatcacaccactgcactccaacctgggaaacagagtgagaacttgtctcaaagaaaaaaaaaaaagaatgttatgaatttagtatttttatacttcccctacaactctagtatctctgaggaaaagcctcaatcagaaaaatgatttgctttggggttttatcttttatcagtgataaatgtgaattgagaatagaaatctcaaaatgcaataatgatagtactttatatttcagtaggacttaatatataaaactctaatatgcattatttaaatttggccaatatgcaagagaaaagcaacatagggcagaattatgagtttgcttcgtaaaataactattaccagttcattctgttcaactatgtactggtagcatttgtaaacaattcattcttattttttttccaaagtgcattgcaaaatagtcttgcctgtattttcctgtttgcagtctatttcattaaatttctgcaattctaaattagaatagcatctaatagaccacatatgaaatgtgcttgctattaattcagacattttatggcatattcattagtcaaatccttagtatttatttatgaagtcacattactctgtccagtaattaacagaagtggatgaatatgcatctctaattttttttttagcaaaagaaatagcttacagtaagtatttataattacgtcagctcaatgtttacagcacttgaatggcgatatgtgtagtttctgtcatttagacttcatagataatttttgtacagaaatgctttgttgttgatgctttgcttccttcacacatatatcacagattaccgaaacaatcattagtccttcagttgcaacggataagactcttctttatccttaattttctgagctcctttctaggcattttatgttcttacacagatgctaatgctaattaatgctttaatatgaaagatactggcaaataaaactgttacattttacccataagttgtaaattcagcttagttgccctaacaatactgatagtgataatggctgtacaattaatatttatggagtgcttccagtatactgagctctgtgctaaacattttacttatgtagcttagttaactctcgtaacaaccctgtgaggtaggtgttattagcccgtttcacagatgaatttgtaatcattatgccttaccacatttaataataacattctctattaatcgtatatttcagatgcccagctctggaactttgcagtatgaaacgtgtgtgtatgtgtgtgatgtatatataatatataagtatgtatatataatatataaatgtagattatataatatatatgtgtgcgtgtatatacacacatttcttttttttgttgttgttaatttatgtgccacgctgctgtacgaaactctggggtactatgatgaggggatacctctttcttgcctttaagggacttaggttgtggtgggagagatggacttggttaaggaacaagtacaggaaaatatgataattgctttaatagggataggtacaggggttgtagaaaaatgagagaaaagggcccccacttcccagaaggtgtcagggagtttttcacagagaagcgtccccagccctgagacttgaagactgagtgagtttgaaaagatgatgtgtggggggaacagaagagagaagggtgtggagatgagggaaacaagatggggtcagggagctacagggagggacttggaggtgctgagggtcaagtgcagcaggaggagagacccggctggctggggtcagagctcaaggagccttgcatgttacccaaaggaatgtagatgtcatactctgtgtgctggaaaacgatttacagatgaatccaatcaacactaattaaatcagtatgattaagggatgaccttcctttcttcctaccttcctccctcccttcctccttccctccttctttggctcatttattcactcagaagattttattgagtgcccataatgtgcaaagctttccattgaatcccaaagatgaaaggaggggtgagagtggacacagttctccctttctggagtttattgattcgtgggggaaaacaagcattaatcaatgaatcaaccaaaaaatgtaaaagttacaaaatgactactataaccagggagggtcattctatacaagtgtgtcctaggaggtggtgacctggctgaggaagtctcccttgagaagaggactgagctgagagctgaaggagaaaagaatacaaggtcatttgatagaaggggtgggtgatttgaggagaagtcttagcaaggaggaagtcatgtgcaaaggctttaaggcctgggaaagcaaggtccttttaaggaattgaaagtaagccagccatgctgtagtgcaagttggaagagaatgcaggttttgggggccatgtttagaaatggaaagccactgcaatgccttaggcaggagccaaggaaggtagtagggtggcagggtggacgcggggagacgtgttagggggccagggaaagagtccagatgagccagggtggtgccggagaggagcggagggagttgaggagtatggctgcatggttgaatatggggcataatttgggagaggaagacgtcagagtgatgttgatgccatcactgagctaggaaacgtaggtgaggcagaatctattctgcttagatttccagaaaacattaggggatagatgaggatgacatcacaatggaatttaagctatttaagctcaaggttggccttgaaaaatgagtaggaattttctttttttttttttttagacagagttccgctgttgatgcccaggctgtagtgcaatggcacgatctcagcttactgcaacctctgcctcccaggttcaagcgattctcctgcctcagcctcccgggtcactgggattacaggcgcccaccaccatgcctggctagtttttttttttagtatagatggggtttcaccatgttggccaggctggtctcgaactcctgacctcaggtgatcctcccgccttggccccccaaagtgctggatttacaggcatgagccactgtgtccagctgaaaaatgagtaggaattttctaaatggcaaggagaggcaaagcatgttaatcaaagggagtgtcatatgcaaaggcagaggcataacaaaaatagtgcaaataaatgcctacacatatacaaaaggagagttattgtgggacccatacataattttgttgatttcttgatatgctcatatccattttgtgttgcagtgattctaagatctgtattagtatgtagactttgtgaacaggtaaacatgtttaagaattttttaagacatggctgtattagatatcgaaattcctctcttcattttcatatctttactttggaattcatatatgccttttgatgttatcatctgacttgtttctaatgaaatttagccgcttaggcaggacgtggattttaggtttctgcttagtgttttggcatctggatttgggattacttagcatttttaatttactaaaataaccaccaacttacactcagttgaaatatgaacatgtcggtttcacttgagcttgggaattaaaatcaaagtacagtcaaatccaaaacaaataatagtaattttaagactaggtgacataaccctctgggaaaaatgaggtgatagtgatttgatactttttttttttttgagacagagtcttgctttgtcaccaggctggagtgcagtggcatgatctcagctcactgcaaactctgccttccggttcaagtgattctcctgcctcagcttcctgagtagctgggattacgggcacgcaccaccatgcgtggctaatttttgtatttttagtagagatggggttacaccatgttggccaggatggtctcgatctcctgacctcatgatccgcccacctcagcctcccaaagtgctgggattacaggcatgagccaccatgccccagccccgatatgttttaatactaactacagaagtgttggtagaaagatcagccttgaagagatggtatagtactagaatcctaagcatgacctctgtgaactgttggcttaagtactggctttaacatccgttggctgtatttactgtcagttttcttgtcaataatgcagaggtaaacatgattcctggccacctcacagactgcagtggagtggggcaatgtgtgtaaagcccttagcacatggcccagaacatagtaaatgtttaatcaatgttcgtgatgaccttggccatcactgacatcatgtcttaactgagttattaacaaagaggcatgtgtagtttcaaaagtgaaagtgaggccggaatggtaaatacatgcactgaatttgcataattttgtggctagaaggagtcttagagaaagagagcatcaaattcagcaatgtttctgacattttctatgaagaactgactgcttgttatttcttagaaatcttagaatcattgagcagggaaggaggggcaggaacgggattattttgatagtggtgtcctcaaggggaggagatggggtgggaagcaacccctggccagaacccactcatccctggggatagggacctgctgtgtctctgcctgctgagtttttgacattctgatttaaaaaccttgtgtgtgtgtgtgtgtgtgtgtgcgcatgcttgcgtgtgtgcatgtgtgtgtgagagattatgcaatatgatgtttcccgtttctgtgacttcagcgaatgtgaatgaagaccacagaagcagcctaactcagtgagaatattgtttttataattacaggtctaggcgttttacactgagattctccactgccaccctttctactcaagcaaaatcttcgtgaaaagatctgctgcaaggaactgatagcttatggttctccattgtgatgaaagcacatggtacaggtaaacatctccaaaagctttaaaggaaaataattatcattgagttgtaaagtccccaagatagtggtgggggtgtatacatatctggtcacacaaacatacacacacaacatacacatgtctattcatgtagactccattttttcctactgtctcttttataaaaatggaacccttgcttttttatgggaaaggaaataacttctacttattttgaggtcactagttaggatagatgacaaggcattgctgataattctgaaggcatttataaatttatagatttataaattcacttagagagacaaacatcaaatggtagtagagattgtagaagtagtagagattattaagagtattgttcctcttaacaatataattctgaacatctttcatagcaacagatatttttctaccgtatagttattaatgattagtataccattgagtaaacattctaaaatttatttaatttatatcccttctaactggacagttagccgtttctaatttttttgcctttttattttcttgagatagggtctcactctgtcacccaggctggagtgcagtggcatgattttggctcattgcagcttccacctccaaggctcaagtgatcctcccacctcagcctcccaagtattaatagctgggactacaggtgcacatcaccatgcctggctaacttttgtattttttttttttatatagtgatgaggttttgccatgttgcccaggctggtctcaaactcgtgacctcaagcagtcttcccacctcagcctcccaaagtgttgggattacaggcgtgatccaccacacccagacattttattgctttcatgatgccaaaaatattcttatagctctgtattagttcccattacaaattatttccttaggctaatttcttagcagcatactggtaaatgtaagagttttcaagttttacggcttttggtaacttgttgccaaattactttcagtaaagtcataccagtttgtatttccagaggcagtttatgagagcgtctacttaatacagttttccaatgctgagaattttgaaaacaaaaagagttttttgctgactgattatgcaaaatggtgtttccatgtattttgggttttgggggtggggggggtcatttgtaagtcaagtaaattgtactgttttgtagaaccttcctccattagacagcagcatccttgaaacttaccagatttcgacatttcagaaataatattaaatccagaaggagtagaagggtcctagggaattttaagttcttcctttctggccaagtatttttagacaactatgaaatcactagatacaatcatttttcagtggaaagcataatttttcatttcttaaaaagagcaaaaaggtatttaataaaaaaattttattagatatgtatctgaagttatactgctcattagtttaaaaatatgtatgtgcctatatatgtatgtgtgtgtgtatatatatatatgtgtatatgtgtgtgtgtgtgtgtgtgtgtgtgtgtatatatatatatatatatatgtccaatatcgggaacatgattaaatataactatgttagtgccatatgatggaaaagctgtagataagattgcaagcttcaggctgcctgggctcaaattccagctctgctgttttcttgaagtgtgacattgggcaagttactttgcatgtaaaattcggataataatagtacccttctcccttgggtgttgctgcaaataatatatatgaaatgtttaaaatcgttaaaactcctatttcaggagtatttaatcatttgagaaaatgatcaatatagaagtaaacaaatgtagggtattggcatgaaccatagtataatcctaatcttccaaaattactttgcctctctttcctccctcttttcatcctcctctagtatctacaaaaagggtttagcatacttctgaatggatttaatttgtattagtggagtaatcccagtcctggagagacttcctgattcaagttttcaagtcagagacccatttttcacagagctttgaaaccatggctgtctggatcacctggctgggggcacccttggagcagccgttgggtgagagcagagcttccttcccagccagggctgcctagctcctgtggtacagcaagtgccttgggcacagagtccctcaccgtctggcaccatatgtgagctgccctagttggctcatctcttcccgtcattactaaataagcttcatttcactaaataaatgaaagagaaggtagatgaagagacccccccgccacacccagctcttaggaaacgcatgctttatcctacagatgcatgaaggggaaggctgtaggtttgtgaatctcttgaccctttggctccatcgtaacgttgaaaagtgaaaggaaaagtggtcaaagaatcatttggcatgaaggagacaaacacagaacgacgtgtacggcttcagcctctgcctttcactggttaccctgctatgagcttgtgtatgtagacgctgcattcgttttggccctaatttctggtctaatttgaacagctctgtatttctcagcagaagaggaatatctgaattcctaattaagacatgttagcttaagaatacctccttaatgtgtcataaatcattcccctgtgactatgaggatgaataagaaaacaaaacttggatttatacacacatgtatattatttcaacaaaattaataagttcatagagggagagaggacaacaaatgtgttagcaaatataggtcaggaaaagagttcataatgttctgccagattctgatgaggcacctcatgagtgtaggtagaaggcctcaagtaacggtagtgggaatggtaataacactaccatatggaacatttggtatttgaatagcacttagcttcctcccaaactacaaaatcaataaagactcagagaggaagaaaggattctcttgctgtggatcactggctggtgtgcagaaatgcagacgtgttggttgtcaagggcttaccagaataaatttctctagggagacaggagagtgggaaatacttaaccatattaattgtgctgtgacctcagatctgtggtcagcagtttttggttgtttccatatactgcacatggttgcccacaccatttttgcattcatgtacaagacctatctgcaagaccaggcagaatcattgttgaaatcttagttcgcaaagtcccatggggactttggggtgtcttaggattttgccagcacaaagttaaagcacaacttttgaattgtgagaaactgagacaaggtctttaattttaatcccattcagtcattcctcactcatttattaatttagcaaaggcctttttaggggcagctatgtcccagtatagggctgggcattgaagataatggaggaaaacaagattgacaaaagactggccctaatggagtttacagttctcagggagatacagtcaacaccatcataactggtttgggggaacaggggagatgaactggaccattctaaaaggaggcaagaggtgcatctgaaattggaaactggagaaaccaggggagacagacctgttgatctggaaggcatagaacagaaagaaccagagaatagtcagggactgacaatgaggttgtgattgttgacagccggaccaggccaggaaatgaagaaggtaaggagagaagcgtactgtctaacacccctcgaatgcacagttgctagggccagtaaagatcatcgggctactcatctctcaatttaggtaatgtaaatgatgcatcttattgacaatccatatccttaagaaattgtgaaatgagtcttttactttttataactctacaaacatgttagaaagatggatgtcaccgtgtctttatcacagtatggtgatttttcttaaccacccaaaggaagaatcgaggtgcaccagaacacgtgtaccttgttctcttattaaccatatcctttttcttactttacccactataattcacctcagagagtgagattaattatataattaatcctaccttttgtgcacatgcataattaactttatttagttcactttaaacagattttaggttccagatctaaataatagcccctccatttgtcacatcttgacctctttactatttggtacccttccactcagcattgtttgtgggattgtggttcttcttaccttcctccctccattcctgggtgcttttagtggtctcttaaataacaggctctgctcagagatttcttttatctccttaggccttgacctgcatttggtaaaggctgcatttttagcttcggatttactgtctttgacgaacctttttctctattgtatccctccctggtcagctgctctcttcgggccctcaaacatccaccacgtactctacccagatgttttcttctttctttaacatgtccagttgagttgcccatatcatcccctactccccatccacacacccacccagcacacacacacacacacacacgcgcgcacacacacacacacacacacacacacacagtgcattctcgaacatggggtcttttccccttcaggcaccgtatgtaacccaccccgcccctcagctcttaggaaatgtttcctttatcctacagaaacacaaaaagaaaaactgtagggttgtgagtccctctcaacccttcgactacatctatatcataaggttgaaaatgaaatgaaaaaggttgaaatgtacatttctaaggttaagaaaatcctactgatattaagtatttaaaacacagacttccccaaaatttatctttcagcataaatatgcccttcccttttctcccacccttccttcaatctgtagatagcctccataattcatagccagtttgggtaaaggcattattttgagacatttaatgatttttttaggaaaagcgaaaaaatgtagggtcaaagattcaagagtatattgtgttttatatgtaggcgtagcttttaaactattttggatactttaaagttttaaaataacttaccaggcttctttatgaagcattttattctttgaaagttttataaataatatgatttctggtgtcagtatggaaacattcacatagttgtaataactctcatgaaataaggtagactattccatcatctgtgtttactcttaaaacacattagaaaatggttgatatcaaagcttacaattttgtctttcttattgctaccctaaagcagactgctgcacagaccttcccctgctacactaatgctgctttcaatgttggcaaaccatactactcaaagtgcgggcaaaactcgaggtagaaatccaactttcatacagctttatcaaaatgacagtattctatggtacttttcaaatcactatttttttctcttagaggttatcaaatgaaatgaagcatttaaatatgttttctaaattcaggaatgtgagataggagagcttttgacattataggattcagcggtggaagagaaaatgaacatccagttccctttctccctaactcaagatctgtgctccctgaatatcattagtgcttctcatttcatcagtgttcaaatagtgaatcattcattcactgattgttgaaacaactgttataagatttggaaataatatacagaacatcttggaagtactttttttttattagcaagaagcagctatatgccaaaagtattaagaaggatcatctcttcagaataagtgagaagtatatcactggtaattttttagatttttgctgaatgttttagtaaaatttgggaaggtagtttttttttgagttggcaattatatgctgtccctcttgttttctcttccaaaataatcattcttctctctctctctctctctaaaatgggagccacagagccactgtcagaattgtatacatataaacctgagaacattgcctggcctggcacatagtcaatgctcaataaacatttcttgctactgtatctactgtgttctgttccccctctgttcaacaccctgtattttttcctggtggagattttcctgagtacctaaacaaataaacatagccaaacaaaacaagaattcagtgctgatgccgtgtgctttagaagctgggtctgtgcttgacttgactgacggagatgtgatactctgagtgtgtctgcagataaagccaaattcaaaattcaagtgaaacgcccttggacttgggaatgaatcggcgggtggggggggggggctttgaccaaggtactcagtgaccctgtgcttccaagttctccatctgtaacatgagtggtttgctctcagaggtttcttccacctctaaaaattaccatcattttgcaaccttgatgctttaagactttgaagtccctgtggaaaagaacctatgaaaagcggtcactgtttctgttttccccgtgcattttagtggctgcatagagtgttttttggtgtgtgtcttccatcttgctcaggtggagctaatgacctccttctccaggatagacaataaaacaaaccaaaacaaaaacactctgttcatgcacaaaggcaaccctcttccagatgcttaaccccttaaatgagtatttcgatgacacagagggatcatcacttcacttgccactgaaatacagccatctctggagtgaaatttggcagctgggaagtagtcaagctgcagtacttatatgacagtttggggaaaaggagtgagacagaaatagcagattccaaaataatcccattaaaacagcagggaaagtggaattgggcaataagatgggaggatggtttgccccaaagtctgactgtcctgtttagacaatgcggacttcagccccagaagctctaacttgtgtcactgctggaatatagtgaccacagtcaagaatcccctacacacaccccaaaaaggggggcttatctaatgtcccattgatctatcgtcttgtgatttttttttttttctctttttcctgctactctagttatcaggctgtgctggcacataaatggatctgtctttttaaagctacctcttccttttgccccctgcataagatagtgttgtaggtaagcatgttataacatcagaaagtactcagctgagaaggagtgatgttaaagcaccctttgggctggctctggaaggatgaactgactgaccagaaaggaaaactcttctgtttaattccaggatcttgggaataacagtgacagagaaagaagattcgagaagtagatgtggttgagtacaaatgtagaactcttcagattttctggaatggggtagccattgtgataaatattaggatatgagcgtggaagtcgtagtggataaatttgaaagctactcagcaatatgtgcagcaacagtttttaaaaagcaaaaggaagatttgtcaacatagttagaaatcctcagatcctcagataatggaacatcatatctctcaaaaggaagattccagggaataaagaaagcagatgataagggaacctgggcattttagtttaaccagaaaatagaacgttaccaaaaaatttagagattaaagagtcagtttcatttagaagcacataaaatgtttatgtaatgagcagaatttatagagtctactattataaaatagaaccaaaaatgaattcaagaaaaatgtaataaaattaatgtagtgggagaaaatgaaatacaatatcagaaattctagttttgaatctcagttctgcaacttatcagctttgtgaccttagggaaatcactcaaaatctgagggttttttccgcatctctataaaatagaaataattataatatctgtctcacaggggtattgtgatgatcaaatgagataatgcattgaaaatgttttgtaaattgtagagccctctacatatgctatttctataactctgcaatttcttatggcatggagtgagctctcagagacagtaatcacatgtggaaatagcttagagaagcagtcatatcagaggcaaaatctattgtataaaaatttaaaaattcatatgaattattttttctgcttctcatttttctggctcagaaattcttctatgtttacagaatttttccaaaaatattctggtaagccctgtaacagaattgtccactctctgttaagcggtaaaccacatgattttttttccttttttttttttttttttgagacagagtcttgctctgttgcccaagctggagtgcaatggcacgatctcggctcactgcaacctctgcctcccaggttcaagcaatccttttgcctcagcttcccaagtagctgggactacaggtgtgcgccactgcacctggctaatttttgtatttttagtagagatggggtttcactatgttggctaggctggtctcgaactcctggcctcaggtgatccaccctcctcggcctcccaaagggctgggattgcaggcatgagccaccgtgcccggccaaaccacaagattttatagtaaatattgcctgtgagtaaaccttgaataacaacattaaagcagaagactgctatcttgtgtcatttgataatcctaatttagggaggtctgggcagagaaaagcggggtgtgtctgtggtctggggacaagagtaatgtaagtagcatgccacatgatgaagactgaaacggagacagtgaagcacggtaaatctttactgagtgtgggctggtgtgctgaagttccctttatgcatcagcccatctgtctcattagcttctctcttaatcacaggctccatgaagtgtctacttgtctttttttagctttttatgtcaatctcctataaaagcaaaaggaagtcaactggcctttatgctgtttgtgtatactccatgcatgctcggggtggggccagctgtatttataaatgcatgctaacatgggggttactctgtgtgcataagagcttatttgtatgtgcattcatgaatatgtgtacatttgggcagatacacaaagacacaacacatatgtgcctctgctgtatgctctcttacatggaaaagacacattgacattaattagaaaaggtgatatgaaacagtgaaagtaaaattcctttcggcagtatttactattgtaattaaagtgcatgatgtaacattatatgtgcaggagaatttgcttattcatcctttagaacaatagtaggagttacatattaacaggtttaagtgtcaataagtgtctgaatacagattctctattgtgtgcagttcttgtaataaggcagtgtattttccttgtgtctttgcttgcttggaattgaaaatgctttggatgaagaatgttgcagagtgtaatttgtggcagaaaatatgcccccactgtttgtttattattcctgaggacatttgctgggctgaactatcatatgtagaaaagaacagctttgtttggaaaatactgtaagagcagtacaagaaaattgaattaagtaaagagacttagggagtccatctttctctgatgatattccttatttgctcttcattattccctgtgaaggaataaaaacgatgaaattggatttgaagactggattaagacaaatgacttttcagatttttttttttttaccttagctgtttccaattttcctagaaaagcacatagtcactatataaagagtctgagtttattgcattaaatcttcctaaatagtgtgcccttgaggtttgatgtggggaattagtttagaagattcaggggcttggagtacctgctaactgtgtgatggcgtgtgtctctagaaattttatatgcccattgatttttatagagcaagcagtacaatagaagggaagcaggatgctgcttggtcttaaggaagtctttcctgcctaccaattgccacacccctttttctccaggtagagttgactatgttttcttctgggccattgctgtacttgcctaatacttttaataaggacttgcaaatgtgcctgtaggtctcttctaactaggctgtaaaccactcggacagaggaattgttttatttcttgtaactctaacacctaacacaaggccctcaagataacctgtcaaatgaatgaacagatgagctgaatacccgctgtgtgcctgttcttgtcttaagacatgagggacaacctgtaacacaggacacaatgtggctgtgtctgctctgaaatggtagaatatctagctacagcttagaataactgggtaaggaaataaatgctggattataacccaaagaataaaatatccaacgagtccaatgaataaataaataagggaaaaggaatgactcttccctgcagcagaatttcagttaataaacaaacgaggaaggaagcagtatgaaaacatcattagaactcatagtaagaattgccacgagaaagtcccaccgatggatgcattagatgggcagatgtggattagatggattagaatgagcgggcaaaagtatatgcagaaacaggaaattcgtagaattttaaaatatccctaccccaaacatttagtaattacaaggagaaaaataaaagtttacggtgaagaatcctggcagacatcaccttaactgagtgatcaaggttaatgtcaccagtgatacatattgacatcgtgtgtcccactgagaagggcgtgtcatctctgatatcctccctgaaaaggcataatctcactctaatcaagaaaaaaatagcaaactcaaatggaaggacattcgaaaaaataactgacccctccccttaaaattgtcaaggtctttaaggataaggaaggattcaggaactgtcacagattagcagaaactaagaaatatgaccacataaaattctaagtatgatcctgaaacaggaaaaaaaaaaaaaaagcctgtttggtgcaaaaactggtgaaatcctaatacaccctacggtttgttgagtagtcgtgacccaggttaactttctagttttgatcgtggttctatggctttgtaagctgttaatatagggggaaactgggtggaaggtacaagggagctctgtactatttttgccgctttctgtaaatctaaaattatcttcaaaaaaacctagttgacacttaggtaggccgaggtgggcagatcacttgaggtcaggagatcgagaccagactggccaacatggtgaaaccccatctctactgaaaatacaaaaattaggccgggtgcggtggctcatgcctgtaatcccaacactttgggaggccgaggcgggcggatcacctgaggtcgggagttcgagaccaccctgagcaacatggagaaaccccgtttctactaaaaatacaaataaaattagctgggcatggtggcgcatgcctgtaatcccagctactcaagaggctgaggcaggagaagcacttgaaccccggaggcagaggttgcagtgagccgagatcgcgccactgcatgccagcctgggcgacagagcgagactccgtctcaaataaataaataaataaataatacaaaaattagctaggcatggtggtgtgtacctgtaatcccagctacttgggaggctgaggcaagagaattgcttgaacctggaaggcagaggttgcagtgagctgagatccggccactgcactccagcctgggtgacagagtgagactccatcaaaaaacaaaacaaaacaaaaaatctagttcagggcacaataccaatccacaggaagcaattatagagcaatccatgacaacagacaactgagaatttgtaatggggtgccagtgtcaggttcagaagaggaatgagaaatggctggggattggagtcttcaggaagagcttcctatgagaagcaaagcctgacagggaccttaacaggatgtgtagtgatgatgggtggaggaaactgaggggtcattgtaggcacagtggcagcagggacaaaagcatgaggaagggacacagatggcctgcatgggatatgttggaggggccagcggagttatatgtgcattgctggagattggtatgaaagagaatttgacagctgtggggataacagagctaaaggatcactaagacctggcggaggaatgtgaagttaatgcaggaggtgacacagagttcccagttcttgtttatggaaggggctcagtgagtttgtgtgtatatatctgaaaccggtgacaatgtatgtagggtggccagagttgggagaaacaggggacaggcgagtcaggaattaaagataggtaatgggagcctattcgtttgagggtgttgggaggatggcaggaaaggaaaagggggcaacatattcaaaggtatttgaagggataaaataatataacttagtaattgttggatttggagaatggagaggaaggagtcaaagatgatttctgggtcatatttactggacaggtactattggtgtccataactgaaataatccattcagcagatatttgcatgcctacatcgaggaataatgtattctaggtgaggaaggaggattaaaaagaatgtcaacacagcatctgcttacgctggaatgtgggccagaaagcctgtggcttaggctagactgaatgaatggccaggtcagcctacttaaggagtccctgccctccacataaaaagaagggaaagattgccctactctgttcctagcagtagccatgaacagtgttagaagatctttcaaactgacacttctgtcctcttgataaaaatgtcaggtctactgttggaccatactcataaaaactctgttaaatcaccattctacttaggaaaaggccattcatgccccacttaactctgccaagatagaggatgctgtgttcccaaggtaccaaaactgaaagttaaaatgccataaaagtatactgaactttatagaagaaaaaacagaaaaagtgtatgcatgcttaaacctcaaactcttgatcttcaggtaccatgtcttttcaacgtagataatatcacctagtgagcacaccctgaagtcatgctctggctggctttgctgtgttctttttgttttctcttgggcttgtgtctcactctgtgttgggtaggaaagggtttctgtagcctttatacccttgttttcatcacttatttcacgaatttccacttattactcaagaataaccatatttttttatctctatgacaagctgaaaacctccctgtcagcaattatagcctgttagccctcacagagtcagtcttggggaggtatggccttgcggttcaggggcagaaccgtaggtgtattcacctgtggaagacttagacatacacatttgattatgggtggcagtaatcagatttatgttttgaaggtcttcgaagatctccgtccctttctcagtcaacattatacatcattgtttcttaacagttgagtccttataccttttttggtatcagtcggtcattaggccaagtaaacattttattgacaataggcaactgaggagaaaattaaccctttttatagttaattgtaagtggaagttgcttgatattcttaaaaatatgaaattgtggaagttctggttctagtctgagaattgagcattgagcatcacctttacaacatgtagacttaaacttcaaatacctttatgatgctgagaactccccatggaataggaaccggccatggcatatctaaaacatgacttacatagcattgcacgatataatatgaatgcatgtttttttgtagaatttagaaagaggctgaacgtgatggctcacccctgcaatcccagcactttggggggctgaggtggaaggatcacttgaagccacgagtttgagaccagcctggacagcgtagtgagaccctatctctacaaaaaaaatttaaaacttagctgagcatggtggcatgagcctgtagtcctagctacttgggaggcttatgtaggaggatcacttgagtctaggagtttgaggctgcagtgagctgtgatcgcaccactacactccagcctgggtgacagaacaagtctttgtctctttaagttttttttttttaattagctgagtgtaatgttgtgagtctgtagtcctagctgctcaggaggctgaggtgggaggattgcttgagcccaggagttcaaggttacagtgagctatgattgcaccactgcacaccagtctgggtggcaaagtgagaccctgtctctagaaaaataaaataaaagaaaataatgtataaaagaatgacatcttttgtagagcggacattggaaatggcagaatactccatgaagtagcctctagattccctttatgggcttgctgtggaagcacatatgttcacattggcagaataaagactctttttatgtccttttaaactaatgtattgacttcagtattttttttatagggaacatatttcaaaattgtaatggtagtcaatggttctatgtaaaaatactttgtctttccacagacccatatataccagccaggtcaccttcattctcagagtgcctgatgagtagagtgcattcaatacaatagctgtcttgtttttttagcagcagaagtgggagtcacatgctgaactcgggaaccattttgaatttattctcatagcaattgcaaggtaaaggcaggcagaatccttgctgtgtaaccctcaacagagctccataaggattgggaaatcaggccatgctttgtcaaagagagggtgcacacaggcatcaaacaggtcacttctcttaattcttaggccaccacacaggaagcacataattatttaatccctggatctttctagagatgcaacaaagtgatgagggtggacagctccagaaaatcgctgtgcaaggagcaagggtagaaagctagggttttggattagacagactccatttcaaattacatcttaacttagtttttattgtaccctctaacaacttatgaataaaataaggggaatatatagagagttaggcgtggggaatggttacaacttatttctcttcttcactttcatctgtctttcttcagtctcttctcccctcttccattaaaggtaaactgaataaatgaatagtgaatgaatgaagtgagcaagctgttttcaacaaagttcacttggtgccacttccatggatttagttataaaagtgatatgatcctagttatcttaggcagaatacatatttctgtgaccctaatctacgtgggtcctacttgaaacctggaaatgataggaaaaaccttcttgggaaggagaaaaatgaccaataaaaaaattctgaattatacttatagatgaagccctggtgaacccagagccctgttgactcacaaggacactcaaagtaagattagtgattcaacacattcacttcttcagtttcccaaatagattagaaggaataagagggctttcttgggttaaacttactaaccacagtgaaggaaggagaaaacctataaaaacttgaagtattataaaatctcagcggtgtgaggccatttcgtttgaggacaaacaaacctagtggattgtccagggcaggtgaatgtaaaggacatttcctgagatgcaacaaagagatgatggtacaatgggcaaggatgttgcaataacaagcaaccccaactcttcagggtggaacacagtagaagttcctttttgatggtgttacggataacttggggtgttctgcagttggagagggcgtctgtatggtggtgattccctgacccagggtccttgtatcgcaaggctcagacattccctcagtgttgggagaccctaaggatcttctgcacctggcagaagagagaagtggggaagcgagagagtgagcagtctcctgggaggtttgttggtgaaattggcatataccacttccttccatgttcccttgaccagaatttagtcatgtggacatagtcaactgcaggtaaagtggagaattgtcagcctgtatgtcaaggagtacagggaaactgttttttcaacaactaaccagtttctgccacaactggataccttcctgacgtcatctttactcccatcccagccccacccgagatttggccatgagtaccctgtaatttgcagggcattatatctctgtctcaggaacagcaggagaccactgagtcaatcggaactgttttttttttttttttttctgagacggagtctcactctgtcgcccaggctggagtgcagtggtgtgagcttggctcactacagcctccacctcctgggttcaagcgattctcctgtcttagcctccccagtagctaggattacaaggctcacaccaccatgcccagctaaattttttattttttatttttagcagagacgaggtttcaccatgttggtcaggctggtctcgaactcctgacctcaggtgatccgcccaccttggcctcccaaagtgctgggattacaggcgtgagccaccaccacgccaggccaggactcttcatcttttaaaccacccgggtctgaactgacagtcccttatgttatcttcatgggaagaagagcaggcagtcatgtgtggctccccatgaaaaggcaaggaaccttctagatactgccgctagaaaccaggtgtgggatagaagccctgcctttgatctatacctgttggtcaggaacctgcttctactttacttcattcatctgcacttcttaggagctgggtcctgttcttgtttaccattactaaattacggggaaattcctgaaattatccagtcctcccagatggttcattctttgtgtgtatacccagagcttggtcatgtccccattcctctctctcaagattagatctgctgtcaaaacctagaaacaagtctttactgaactgaactctttattagcctttgattgccagataactggacttgggaaggggagtttgggaaaaagggttaactatattaaatttttttggtgctctcttatatgggctgggatgaagcatttagacagtgggagaagtataggagaggcagacagatgccagaaaaaaaaaactttggttgtttccaggtaccgaaaaagaaagttcatttgtaagtcacccacctcctcatgatttcttcacctcctgtcccctgctcatggtactagagtttgtctatattataagctctatagctctttttgccttcctgcaaaactaagcactatttataacactgtttctctgagaaaatgtgtttggagtttcaaataaatgacttacaaatgaactttctgtatacaactcattcatacattgagaactgcctgtaccgggcatgtaacctggagataacttttatctctgctttatcaatatgggcttgtcaggttgacttatgtgtacttctctctgccttcgttttgatgatagcctctctcttaaaatttaatactctctttatgtttggagaaacattccctttggcagcgtttcaaatattcttgcgaattggaatagtgattttattttatctcccaatgtatctttaataggattcatggctatgaaaatcttttgcacagtccgcctataaattgtagaaaaattgagaactatttaaaagaagggggcgcagaaataatccttttctagtattactctgggttgtcagatatctttgcaatataattactgtgttggtttttaaaggttaaaagagctctgacgtttataattctcttttgtgtgtgtgttctacacatataaggggaaaatctaacacatggaaggaaaatactttagttaacataaaggtcctgagcattttatggtttttcaatacagagacataattcatggattttatatttgcttttacagatatctggtgaatcagttatttgctctgtggaaccaatttgcagtttacacaccttgtttatttctaagctgtgtgcatgggtaatgtgtgcacaaaaatactcttgctgacattagattgtaaagtaaaaaggcggaacactggtcctggagatatgccttctcagggaacttactatccatatacaagtaaaaatttctcattgttagcagagcagctgacagaatatgatcacaaatgttgctgatgctgttctgttaggaggtagaaatagaatgcctaggactatgcaagcttgtcagagttagattgtcagggtgatgtgcttccatattaaaaagaatactttgttcccccctcacacatgcacccttgcagtggaaagaaacatttatttcagaataagcgcaagttattctgacttgcactcacaggctcagactttgatgccagtgtagttaaaatttagtgaataccagtcatgtttaatggtctttcccttctgtttaaaacagtactgcagcccatgcaagaaacatttccctttaattttatgcattttgtggtatcttttgatggtttttctctactgtcaaaactgtgagaataatttcaatggcatgttttttctgccatcttcagttggcagtcatatccccccagattgtcctcatagattccagatcacctttatgtttaatcttcattaattgacaagtacctttgaaagggttttgcaaaaattgaactgcaaagctgtgatttaatacaaggaaggctacatcagtgtgaaagaaagcactttatgaactgtagagtactatttaaaggtgaggcattataattaaatatgctcaggttgttactgagcattgaatgccaaagcatatgaaagacaacttacgatgccaggagtttgagactagcctaggcaacacagtgaggacccacctctacaaaatgtttttgttgttgttgttgttgttgttgtttttgagacggagtctcactctgttgcccaggctggagtgcagtggtgtgatctcggctcactgcaacctttgcctcccagattcaagcgattctcctgcctcagcctcccgagtagctgagattacaggaacccaccaccatgcccggctaatttttttttgtatttttagtagagacggggtttcacagtgttcgccaggatggtcttgatctcctgacctcgtgatccgcccgccgtggcctcccaaagtgctgggattacagtcgtgagccaccgcgcccagcctgtttgtttgtttgtttgtttgttttttaattggccaggcatggtgagatgtgcttatagtccagctactctggaggctgaggcgggaggatcgcttgagcccaggagtttgagattacagcaatgttatgagagtagctagaagttacaccaatgctgcaggagtttgggggaatccagagttgtaaaatgccaacaaaaattattaattaaggggatctcttagccgtctctttgaccctacaaaaaacatggtggtactgagttttttagcctcacccaagcaaaaacagaatagggcattgtatttcttatatctggatgcaaaaacatgaaatgttaattgtagattataagtcattaagtgtcacggatttatgttttatgacaagttggagtttacagatttctaggctatttttttcacatagagatacatgaaagctttattcttgttattcaacgtaaatcttttataatctgctctcaatttccagtatcctgaaaaatcctttttctctcttttttgagacccttccctccccctaccatccagagtcatgcagttaacagttctgatagtgcttggattcatttgtagattgtacataccaaatggagctggcacctcttcatggaaattggacccagtgggctattttacacttgccggatgtgctttcctcagtagaagtttatattttatagctgatactccattgaccatagtaacctgttataaaacatgatgttttatcatttgttctgtgtcttcagggctgaacattttatggagagactttattaacatttaaagagactttattaaccctagatattaacatggtttacctggaaattttttgagcaatgttttcatttgattcctggaatgttcaaatagcaaaggcagtttctgttggtgtgcatgtgtgtgtttgtggttaaaagccagcattacccagagaccttctggttcatgtggaaattattattattactatgattattgttatttttgcaaatgaataaattgtcattctgatttttttaacctcaacgttcctttaaaaacactgttgatttttatggagaaggttgatttcctggaagtaataatatgatgttagagattactttttaggcaatattttggcatgtttatcagataaatcaaacatcaaataaatagattatggggaatgatttttcagtaatctctttttgcagtttcttccctaaacaaaatgatgtggcctattaggtggattggtttggaggacaattgcttacagggaccctgtccttatggtgtggagaagcagaaaaaactcacagtactccagagtagcccccttattctttttcataaacttcaaactaggtatgaaagacctgtccactttaaagctttcgcctgtgaagataaagcagagattgatttttaaccactatgctcatatggggaaacagaatgcaggagctaagatttaaagaagcagatgggaagaagagaaataacctcctctggcatccacctggaaatgtctcctgagaaagaggatggacatcttctgatattcataagtcaaggaactgcttgaattctgtattccgtgtacagtattctacctatcaagaccctcacccagggaagaaagtcttgtttattcaggagatggggagcaggaggcattgaggactgcatagcttatttaaattaaaaaaaaaagtgcaatgaattgctttttagtgtatttacagagctgtgcagctatcaccacaataaattttagaacattttcatcacccctaaaggaaatcccatacccatcagcaatcacttcccattttcccccaatcctctaccctcagctcctggcaaccacgaagctgtttctctatatatagatttgcttgttctagacattccatataaatagaatcatgcaatatgcggacttctgtgactgacttctttcacttagcataatgctttcaaggatcatccacatttcagcatacatcagtcattcatttcttgttatgatggaataatgtaacattgtatggctataccttattttgtttattcatttatcagttgatggacatttgggttgtctccactctttcactattatgaacagtgctgctatgaacattcctttccaagtttttgtgtagacatagtttcatttctctgtgcagcctacttttaggtagttacaaattaagattgtaagtgatttttttttcattttacacatttgttcgcttcacgatggcctcctctctcttcttacctatctcactctcccaaaaatgatttttcttgagaacatagttgtagaagggtaagaatatcaaccaacttttgctaagtatgaatgcccaggcgctctgctaagcatcatgtatgtgttacaatgtttctcactttatagacgggggctgaggtttagagaggctgctaagcctggaggtcattcagctgaaaaggtagaagagctgggatttggacccacatcctgtttactcagcaaggtccatgctgtctgttgactccctcatgatatgatcccagatcatacacctgttgaaatcttagagaattctctttctattcgtgagcttctcccaattgtatcctaaaaagtaaggaatataaatcagatgctccgtcctaagcccttggacctggagcgggcatttgtgttccccgttgacaaaaagatgatgaaatacttcctctgtgtctgagtgcagcggcgtcatggaccggtgttaagtttaacctgacccttctctctgccctgcagttgcttcatctcctcaccttaagacttcacctttccttcatttcagcttcccagagatactgccacaccccggacctgtgtatcaacttgaaccctcacaccccccaacttggacctttctaaatcttaaaatctcagactctgtagttctctctgggcatagcctcctgacccccttgctttccctctcttcctcagaactcagttgtctccttattgtgagccctgactcatcccccactcttggtcactatagccactttcttcaggctccgtattcctgccccctaaccagcctagacctcatggcttgaaagtttaactgtgcatgcccaatagcttagtgccatgcattcctttccaggcaccaatcctgcatgatccccatcacctgcacagctgcttagaggcccccaaacccaactgatgggtcctgatgtaaattcttactgttaatctgaggagagtcatcattgcttttctagtgggctcatagtcacatttcttatgggatctattccaaacttttccagtctcttcaaaacttaccctcaccctcactttggtagaggaccatttattcatcttgcttttttaaaatcttgaagaatccaggcatgaatccttctactctctttttccctttaattctgtccgttgctcctgtctcacagttgcagacaagtgttgcatgctgtgctcacgcatcccagaggagcaagaagacctcccactccgcaaggctccaagacccctcgttttctggatccctctctaccctgacttctctgaggctttgtcacctaggttatctccctctcctgcttgatctttcattatcttcatcttaaccaaaaccttctcttcagtctatgaatgtgcctagtggtgtggcctgtcttttaaaaactaaaggagcccttattttgaccttgttctcctcaggcaatttccatttctctattctttctttaacctcaacatgttttgaaaacatagtctgtgttctattcatccagattattaccacccactgaagtcttagtcaccagttcttctctgtcatccaagcactggaaacttctcggcccaatgtcttcactggcctaagatggactcaaactagtaagcttttattcagtggttactcctagacctctgggctgtatttcctacggtggctgctgccagccatttcatttcttttcttttctttttcttttgtttcttttcttttctttttcctttcctttcctttcctttcctctcctctcctctcctctcctctcctctccttttctttcttttcttttcttctccttccccttccccattccccttctttcttctttcttcttcttctttttttttttttttgagacaagatctagctctgttgcccaggctggagtacagtggggtgatcttggctcactgcaacctctgcctcccgggctcaagtgatcttcccatctcagcctcccaaatagctgggactacaggtgcaggccaccacacctggctaatttttgtattttttgtagaggcagggttttgctgtgttgcccaggctggtctccaactctgagctcaagcaatccgcctgcctcggcctcccaaagtgctgggattacaggtgtgagccactgcatcagcctatttgtttctgaaaacactctttatctgcctttattttctcttaccctctactgctctgatcatttcttctttatgtcttccttcttttgtcccttttcgtacttattcttaaaagtagattctgcctaagtgtgtataaccacttttcttccttgtttacatcttccaggtcctgagggagtgttgtgacttggttacagcctaccttcctaaccttactcattgcagcccaggcttccccataattatatacatgttcctctcacacctcaagctcccttggttttctgcttctgttgcatctctggtttctttcacctaggatcatcctcctgcctcccctctctgcatttctatatattcttttccaggaccacatcaaattctgtgttctccttatgacataatctcaaatgaccccaggaagttatcttttttttggtccacatttttaatgggacctttcttacttttacttggttttcaaattatttgttgaaacacatttcttttaaactatgtactcatgagacagtatattgagaatttaacccctgtccttaaacacagtaaatattgtgtcaatgtttgctaaatgaaaggagtgaaaagtatggctctatgggaacttgttggtgaatgtcccatttttatttaccaatgaagaaaagcaaaacttagcaaaatgtatctgtggagaggtgggtgggagagggttgttgtatagtctgaaccaaaataattaactcctgtaattgcaaaaatattatcattgctcagtgcaccattttgcagttaatcagatagttttagggaaatattaaatgattctcaagcttggaaaatagcaatgagtgttatggcatcactatacagcccagaatgaactcatggatcctccaatctcttgtatcagatatactgcatactggatacccaaggcatcagggattcagagaaatttttccgaaggtcatctgggtaggaagcctgacttttatagaatatttcataaaattctttttattttatttttcaatagtttctctacattgtatacaaagcacactaattactcactcccattgtctccactaattacatcactcccattttgttctcctatgaacaaagaagaaaggaacaagaggttgttttttcattttgaagaggcaaggttgatatgtttgactaaaataaagttgggattacctgtgaatttcagccagctttgccctccggtccatcaggtggacagtggaaaattgactgtgatgctaaaaatggtcataattgggggaaagtaagctttaccacctcttttgtgatgctgaatgtgtcttcaagggaatcaaaaaagttgtgcttgacaggcaaggtgaaaaacccagggatttgctacaagaatctctgcaggagtggtagaatgagaagcttcattggagtctgggacattttagtgttgctggcccattaccctgaacactcttctaacctcctccaagacgggtgtctgagaggagctgggccctgcagaccaattctagtcttctctctccacccctgccccctttagaacaagcatattaaaggaatgtctgatgagctcactatagtctttgtcaggacattttattttttatttttttatttttatttttgaggtggagtttcgctcttgctatccaaactggagtgcaatggtgtgatctcggtgcactgcaacctccgcctccccgtttaaacgattctcctgcctcagcctcccgagtagctgggattacaagcacctgccaccatgcccagcaaatttttgtatttttagtagagacggggtttcaccatgttggccaggctggtctccagctcctgtcaggacatttttacagctgttttcgttctaaccctaactgatgaccattggaagacctaaaaattcagctacgcagaataagtaaaattggtctttttctttgcatcctgaggataaatctaaacaaacccctctcgttggcatatctccagctacaacagagggcaaatttgaatggattatgaagattgaattatccacttggtcttggaggtggtcccgtctcctgtgatggtggggtggggaggcggtgcagacatgtgtacaggaagcttagccaaatgcctctatttgggaaaagttgaaatcagtttcctgggcagtcaattttgagggtttaaaaaactttattttttttttattaaacatactaaaaataacaaagctatccaaaattagaccacgtactttgctccttttatatttcagtgtccttggtatgcttggtttcttttctttctttttgaagcattaatattgttttgaattgctagatatacagaaggtacgatagatgtacaaggaaaaataagcatctctcttatttctgtgtctaagtcacttgaattctcacctagaagcaagtaccattatcattttcttgtgagtccttttaaggatattttatgattatataagcaaaaatataggttttttaaaacaatgtttacaccccatacactattctgccctttacctcttttcacctaacagtgtgtcctggaaaacctttcttatcggaacatagaacagccttattcttttttagtatctaaatagtattcgattgtatgattttgccataaagtattcagtcccacattgatggactttttttttttttttggttgtttccagtcacttgctactatgaacaatgcttcagtgaacaactctctataaatagcatgttgtatgtcagcaaggatctctggaggagaaattactaaaggggaattgttggatcaaaaggaatatgcagttttaattttggtaaaccttgccaaattgccctccaatttggcattcgtcctattgtatgttcctgctagcactgtttgagtgtgcttttctccacagacgatgtttttaaacttcacgatctttgccaatctgagaggtgaaaactactatattctagtagctttaatatgggtttctgttattatagtggtggttgaatatactttcatatgtttaaaagccgttcctattttcttttctgggaaatgtatattcatcctcgttgcccatttttctactacgtttttggtttatcctgtgaattgacttttttttttaggagcatgtaacagctaaaaagattagtccttttgtcttatgctattttagtttaaatttttccgtttgtcttttgactttatgttttcttcatgcagggttttaaaaaattaaagtcatcttatttatcagatttttattttttggcttttaatttttttacatacttaggtctcttctacgcagtaattataatttttaaattgtctcgtattttttattagtattttaaaaataatagttttggccaggcacaatggttcatgcctgtaatcccagcactttgggaggccaaggcgagagcatcacttgaggccaggagttagagaccagtctggacaacacagggagaccctgtttttacataataataataataaatagccaaacatggtggcgcacgcctgtttgtactcgggaggctgaggtggaaggattgtttgagcccaggagtttgagactgcagtgagttatggtcgtgctactacactccagcctgggtgacagagtgagaccctgtctctaaaagaaaataaaaattaaaaaggttttattgagatatgattcatatatcgtaaaacttaccttttttttttcttttttttttttttttttgacacaggatctcgctctgtcacccaggctggagtgcagtggtgcagtcacagcttactgcaacctggaactcctgggctcaagcagcctcctgccttagccttctaaagtgctaggattacaggtgtgagccactgtgcccagccacaatgcagtcttttaataaatgggtttttaatctattcatagaattatacaatcatcatcaaaacctaattttacattttcattactccaaaaagaaaacctttacccattaagcacccactcccccatttcctctaccttctggcccctggtatccacttaatctatgttttatctctatggatttgcctgtcctagacatctcatataaatggaaccatataatgtgtggccttacacaactgacttttccacttagcgtaatgttttcaaggttctttctcatatttttatgctttcattttttacgttcaaatctttggtcaccttgggatttattttagtgcaggatgtgaattagggatctatatttttttaggtggccgtccaattattggaagtccttcctcccactaaagtgcagtgacacccatatcattcactgaagtccagtattcatttggatcgacctcttttctgttgaccttgctaagtattcctgtgcccatgcacactgttttactttctaaggctttataatatttttaatatcggtatggtattcttttcttatttctttttatatcattgttatggccattctttcctgtttatttttccataggaacttcagaattagctttctaatttgtatttttgacatcatataagtttatagataaatatagaaagaattattctcttgatattgactttctattcaagaagaagatagacctttgcagttgttcctatctcctcctctgtccctcagtagtatttaacattcttctttatgtagatttgttttttttttttttttttttgaaatggggtttcactctgtttcccaggctaaagtgcagtggcacaatcttggctcactgaaacctctggctcccaggttcaagcgattcttgtgccttagcctccccagtaactgggactacaggtgtctgccaccacacctggctaatttttttgtatttttagtagagacggcgttttaccatgtttggttaggctggtctcgaactcctgacctcaagtgatctgcccacctcgccctcccaaagtgctggaataataggcctgagccactgcacccagccctctttatgtagatcttgcatatagtcctccttcagtttatccctaggcattttatatttttgttgttatttaaatatgggatacctttttactggttgtcctttagaaaggttattgatttttgtatattcttttgtttcagttaccctacagaattctctaattaataagttgttcaattgacttgctcagatcatagcatttataaataataatttttctgcctgttataatttttatatcccttatttatttctcttatgcagttaaattggctaagtttaacagatcagtgttaaataacagagatgatggtagacatcctcatgttgttcctatttttaatgggatgcttctcatgttcccccattaacagtgagcctgcctttggggtggagcctgtttattgtccatttggcgtttgtagggcttttataatgagtagaaaacgttttggaaatgctgaatctgacggaattatttgcagaaaggtaaagtatgctgtgttagttctcccgcagtgataaaatagtagtctgatttttcttaccagcattgacaggagtttatgagtgggaagtctgtgctataaaggaagaaggcagcaattgtattttaatctcatgctatttttcttttgccaacgaagtaaaaagactaagaagctataggaatatgtagtaaaggcttttgctaagagagaaaaggaagaaaggtggaagaatgggatggaagaaacgagataaaagtatacctcattttcctcagcgtccccccagatcaagtcacctgataaaccaaatattactagggtagtttttttccccaaaatattattaccaaaaaatgacacaaaacactaattgtcaaccaaaatgataaagagtctccgaaaaggcttgcaagaaaatagtgaaatattttatcatttgtaagcaaaagataataatacagagttccaaatactgagaaaccacaagaggaaaaagaatgcctattgaaacatgtttatatgttgattctttttgatggtgccattaaagaaaaaagaatgttttgatctcttgcaaagaaagccaaactagagaggtattttatgagctaaccccaaacctgacattactctagtaataaataccaggacaggctgtcccttgcattagcagaactggaaaacaaaacaaaagacagtaacaattgaggctttgatgcttgttggaaacatctaacatacagagttagtgtgttgtggtcataaacaaaaggagtttaggctgactccataaattagggaaactgatgcgtcctgttgcttgggacacactacacaattatctgcatgacaggcaggaaagaaagcactggaaggcaaacagactgcagaacaatgtggccacccagttggttttagacacacacacccctggcctgcagaggtgtctatttgacagccggtctcatgtcaaaactttcttttatgtgattttccgattgtaggaaccactgggctctgggtgggtgtcttaggcgagtctgccttagtgttgagtttgacatatggtagcattgttaggtggtgtgtttaggagaagccaaccagggcctcagagccaaaagcatggagctcactggctgtgtgaacttgaccaagctactgaacttttctgagcctagtttgtcatctgcaagtaatgcctacagttcacggcttttgtatgtacttatgagatgttgtacatctagcacctcacatggggcttgtagagagcagttgctcaggcagtgtttgtaagtggagcacaggaagcaagggatggaaagagtatcacatcaggaccaaggatgaaggagtgtttgtaggaaagacctccgagatgatggttgagatggattatgtacaataaacaggaagcatgttcttgggaagtgcttctaagcatagaagggcagcattttcaaaggcatgggtgtggaggaatctttgaaacccagggaactgtagtagagcatggctcagtcccagggtatgagatggggagtttcactcattgagacaggacagatgagccagcgtgggattgagtggggactcgtgtatcctgttcagactatagtcacgatgatggagagtcgttaaaggctgtagacatggccaggcatagtggctcatgcttgtaatctcagcactttgggaggctgaggcgggtgcatcacctgaggtcaggagttcgagaccagcctagccaacatggtgaaaccctatctctactaaaaatacaaaaaaattagccgggcgtggtggcatgtgcctgtaatcccagcactttgggacgctgaggtgggtgcatcacctgaggtcaggagttcgagactagcctggccaacatggtgaaaccccatctctactaaaaatacaaaaaaattagccgggcgtggtggcgggcgcctgtaatctcagctactcaggaggctgaggcaggagaattgcttgaatctgggagctggaggttgcagtgagccaagaccgcaccattgcactccagcctgggcgacaagaaccaaactccatctcaaaaaataaaaaagctgtagacatgagggacagcatttcatttgcattttggaaatgtgacagtaatgtctctcgggtgggtttagagattggggaggaaatgagctctggcccagggtaatgatttcttccatattttccacaaatcttagcacagggctaaacgcatagtagatttttagggaaaacctcttgatggccttgaacaaaagttattgttttgccaggatcatcttttccatgaatcacttgttataccattagtagattattcttgtgtggagttgatcattttagcccccaaattatttttgtccctcgattacatcatcttaaacgattgtgtgttgtggcatagacatatcctaatctacttacaatttatggtgcaagtatctgtgtcataaaagatatcttcttctttaaaatatgctagcctagcactccatgaaaatggagactcacagtgctgccctgtccttcaaagatgtttatgtacaaagggataactgttcccacccctaaatgctttaggctttgcctatactgcctttcaaagctttccctattttaagattttttgaggccccttggatctctggaaggagaaagctataatagcttttggtttctgattgtctttaagcagagaaaactcacagtctcatttaggggcgtgacacattcctagtagggatggtcagtcccaggcaatagctgtggccatgggctgttgagggccatggtgagggcccatgcggtaacagacagtggtatgcatgctggactggggtgagtaaatagccattattcagaaccacggattctattttcaatcagtctgtcaactgatatttttgagagtctgccatgtaccaagcagagtgctaagttctgaagatactaaggtagacaagataaaaatggcccctacccacatggcactacattatagttattataggagagtggatagaacatatctagtcaattaccgtgcactgagaaaggtactgtgagacggaaatacaaagtatggtggaagcatcctggagtgacaactgaccctcacttggaaggccatgcaggacttccatgagggtcaagagtttcctgaacccggacaggagcaagatctaccttagagaggtttggggtgaaataacgccatgaaagggatagtctttaatctagaaggaaaaatggagtattacacatttgtaataagtgttcgagatagcctttgagtcatacagtatttggaatgtatgcttggctgtcagtgatcttataagacccaaaccacagttttctttatgctgtgtcctggcgctgccaatggccagctggaagggccatggcagggtagccacgtagagaggccacctcctagaggcgcatagcctgaacgaaagcggaatttgaacaacacctccgaaaagattggaaagtcatggtatctgtgcgattgcccacaaggaggtctcctgaagtcgaagccctttggttctctggcgttttaatgatttgctattctgtcatcggaaatacgtggagcagccacatccttagacagaagaggcccagccacgttgctctggagtagaatttagtatgagtgtgagtggaagttaaacagatgtggaagcgcagagtgcagctgaacatcattgacatggaccagcaggtaaacagacttcaaggtgatacacccccgtaaggcaatgttctggccagctccgccagtcaaggctgtacagcggatagtaattatttctgtcacagcgaagatagatgctggatgtgggcagatgggggtagacttgtgaaaagtgtgagtatctttgagtatcttttataaatttagtgagtggagtggcaacccacctacacttctaatttttgctgttggaagctatgtccagaaaagagaagagaaatttctctacctgataaattacaccttattcaaaacacactgtgtgaatgaaggtgctgcttcgtcttctctctgctaacgtaacgttgtgcacaatattttttcttttgaagcagcagaaggacattttaatagaaaaatacctttactcctgttaaaggagtatcttggagttcttcacctgtctttatgggggacactccccactacatggcttcataaggatttagggatgacttgctcattagacatagagtgagctggttagaaagacaagtgtgagttggggtacagtggcatagaatgtttaaaatattgagcaatttaggatccttattctggactttaattgtttctagagccagcctctccacgtgtgagtagcatctttgagtggcaagaaaaccattctgggttgtcattgagagcatgtgtccttggagagtgccttagcagtacctcctgtgtcctcccacgacacatatccacctatgcacacgtccaccatcctatacgcacacaggtgcatcttgcagtttcacagcccgagcacagccagagagaaatgactaacatagacttgatttttcgatttaaagacgctcctctttttgctcttcctcttgaatatgacttttcttttccttattttcagtgttttcaagggaaatgtcaaattttcagacccgtaacttctgctagaatcacagaccattagggactgtagagatctaacatgcccagctggaagcgccacagcaggatagctgtgtagagacgtgcagcaggcattcagaaaaacagatctgcatcttggaaagagaggtcagggctcgacttgtggatttcagagtcactcacttagaagcagtagacatagtacacatctaatgaaagcattcccctgctcggaaatcttcagaagtccctcagattttacagaatcaactcaaattactcagcaagacctttgacaccctccaccatgtaacctcttctttcctcctctcccacttctgtctccccacacacatacacctccaaccgcaatggtctcttgaacatattagcacacgtttcttcccactttttctcaagctgttttatttctttagcattagctcagattccacttccttctggaatctttctttcatgaattcagatcgtgaaagaccaaagggaatgttggggcctgtcatgaattagaaaatatattctctgttttcaccaatcacaagtcttgtatgacttgcctagaatagcttcctttatgtgttctaagggatatgggagcccgtctagactggcctccttcacagcgctgggatccgttctgcaaacccatcacagaaatacatgtggcttcttcctgcagtaaaatatgtaggaacttatccaagatttttctttttattcttcatttatgttattttatctccagtgttatgtctccaaggatgttaggttgaattatcccctctgaaaagccatactagtttttgaattaggatgcagtgattctaacttcaggtccactgtcaactcattagtttatttaggcaagttgcataacctctgccttaatttatcatctgtaaaatggggctaggagtaactcatgatttttataaggaaaaataagacctgaagttaaaacattttggaaaatgttttcaaatatggaatacaaacatgaggtgatattattgctaccatattgcttatagtcaagaaaaaaacttaatcctttttgataatctaatacagactgtgtcatactatatgttgcaaaaaatgtatagaacttgacattcgaagagatgagtattttggctctgtggtttattagctgtgtgtccatggctgacttacctaacctttttgagcttcagtttcttttctataaattgggaataattatgttactatttattagggttgttaagtaattatattctgcaactattatgcatgaaaggcacttttaaaactacagaagagcatagtcaacagtaaccatcatggtctcacttatggcctaataattatgcctactgtagaaatagatcaaaatgtatttggattcccttttctaggataccctctcagattgtcccaaatatacaagggatgaaagaagaaggaacaagtgtgggctgaatatgcagaagaggatggaaagttgacaggagcatgtggttggaagaggccatgttgacatgcagattgtgtgatagccacattgccagagctgagagggtgcaggagggaaggcaagagggaagccttggtatccatgtaaaaccagtgaccacttgctagggtgtgtccataagcattgcatgcctattctttttttttttttttttttgtattttatttatttattttactttaagttctggggtacatatgtagaacatgcaggtctgttgcataggtatacatgtgttctggtggtttgctgcacctattaacctgtcatctaggttccctcccctccccaccccagtccccaacagaccccggtgtgtgttgttccccttcctgtgtccatgtgttctcatttttcaactcccacttatgagtgagaatggcatgcctattcctttttttttttttttttttttgagacagagtttcgctcttgttgcccaggctggagtgcaatggtgcgatctcggctcaccacaatctttgctcctgagttcaagttattctactgcctgagcctcctgagtagctgggattacgggcatgcacctccatgccctgctaattttgcatttttagtagagacggggtttcaccatgttggtcaggctggtctcgaactcccagcctcaggtgatccgcccatctctgcctcccaaagtgctgggattacaggcgtaagccgctgcacctggccagcatgcctattcttgaatgtgccctttaagcagtagtggacaacctggggcatcggtggtatcctctgtgggacaacagacacctatatgggagctggttccgcttccctcacttatggctttttacagccatgtgccgcataacgacatttgggtcaacagtgggtcacatatatcatgatagtcccataagattataatgaagctgaagaatttttatcgcctagtaatgttgtagccattgtaatgtcctagtgcaactcattactcatatgtttgctgtgatgctgcaaccctactgtgctgccagtcatgtaagagtagagcacatgcaattcggtacagcacataatgcttgataatggtaataaacaactgttattggtttatgcacttactatactatacttttgatcattgttttagactgtatttcttctacttatttaaaaaaaaaaaagttaactgcaaaccaacttcaggcaggtccttccatagatgtgtaagaagaaggcactgttgtcataggagatgacaggtccatgtgtgttattgccctgaagacctctcagtgggacaagatgtggaggtagaggtgatatgaatgatcctgaccctgtataggcctagactaatgcgtgtttgtttcttagtattttattttgtttgctatttatgtatttatttatttattgagacagccttactttgtcgcccaggctggagtgcagtggtgcaatctctgctcactgcaacctctgcctcctgggttcaagccattctcctgcctcagcctcctgagtagctgggattacaggcatgcaccaccacgccggctaatttttgtatttttagcagagacggagttttactctgttggtcaggctggtctcaaactcctggcctcaagcaatccacccgcctcggcctcccaaagtgctgggattacaggtgtgcaccactgctcctgccttagtattgttttaaaaaaaaaagtttaaaattttttaaaaatgaaaatagaaaaatgtttattgaataaagatataaaagaagaaaatattttcgtacaactttaaagtggatgatgttttaagctaagtattattacaagagtcgaaaagttttaaataatgtgtttataaagtaaaaaagttacagtaagctaagtttaatttattattgaagaaagaaatttcaaaaataaatttggtgcagcctaagtgtatacagtgtttataaagtctgcagtagtgtacagtaatgtcctaggccttcacattcgctcaccacccactcactgactcacccagagcaacttccaatcctgcaagctccattcatgggaagtgccctatacaggtgtaccatattttatcttttctgcttcattttgactgtatcttttctatatttaggtatgtttgaatgcacaaatacttaccattgtaatacatttgcctgcagtattcagtacagtatcatgcagtgtaggtttgtagccgggaagcaatacattgtaccatgtagcctagatgtgtagtaggctgtcccatctaggtttgtgtgagtagactctacgatgttcacacaacagaatcacgtgaagatgcatttctcagagcatagcccaccgctacccaacacatgcctgtaggtgaggatgaggaggtatctgtgttaaactgtgtcccccaccaaaatgttgacaggctaaacctcccagtgtccatgaacaatggctttatttggaaggagattttgcatatgaccaagttcagatgaggttattagagtgggctctaatctgatatgactcatctccttgtaaaaaggggaaacttgggctcagagatagcctccctctgaggctattaccgtgtaaagactggagttatgctgcccaaagccaagaaacaccaaagatatccggaaagccaccagaagctgggagaggggcatggaacagattctcctttgcacctcctggaaggaaccagccctgcagacaccttgatctcggatttctagcctccaggactgtaagacaatgcatttctattgttgaagccccccagtctgtggtactgtgttattgcaaccccaggaaactaacacaggcaggtagaccatccacacacaccaccgcttctctctgacgcctggtgcacagcttgggtcttgtggtgagactccacatggtaggcatttgctggcggtggatgttaaaaatgacaagatttcctctggtttgacttttgaaagcaggtgcattgaaagccaaatctcagggtttggggttggtttagaatgggatttctgaaacattctaattgtctcattgccatcacctccccaaatactgtatctttatgtgcatttggaaggaaaaggagtgcaattgaacagtatatttccgtctgttaggcaaaaccttttatttgcttcttatttttccaggcttggacactttcgtgagaatatttgcagttctgttgtaagtccacttcggtcagggatttggcaagtccacaacaaagagagggaatgtttcttttcccttttcccactttccttgggcttgcctgttctttctctgaaagatgctagaacttccccaaggggagggcctgcctttttcctccttgggaaatgttgatttatattatatgaaacatttgtttttcatagaaacttccatttcagcatgttgaaatagttggttctaatttttatgtgaaaaataaataaacttgtcgtggcaatactctcagggtacagttacataataactatgtatgcctccccaccactcattaacataggagatctcacctcacggaagtcatctcatagtctaagctttatggcttctaacagcttttacgaaactccatgaaaataccttaaacataactgttacaagttgaaagtcaaccctttttataagtatgtcagaagtaattatatcttgtagtagcaatttcatatctctacttatagttgggacaattaaggctcagaaaaatggcaaagctgagattaaaattcaggattttctgatttctagccaatgtcatgctcattttctgtgttaattttatggctcagggtccagttaaaaacgtctgaagggagtggtaagtacaagagagatgggagttgggggtggggcttgaaggagagcacacctggccccaggtgacaagactgggctccagccctgcctcatcacagttggacatgatggccctgggtcatttgacttttgaggacctcaggaaaatgagggagcttaaaaaattctatggttcctaatgaaatacttagggatgaaattacagttctgggatttgcttgaagacacaatcagccatggtttgtcactgttgatgctgagtaatggatatttggtgttctattgtgagtctttggtacatgtttggaattttccatgaaaaaaccttctgcttctaaaatgcacaccttgattcttcccatcgccctcctactggctggtcctgtgcagctcactcatttctcaggaacagcagcagactcactactctgaaggaaagaaagccctttgctttggtctgttcctaatgtacatattattagagacttttccgacaccctccccattttttatttcttaacagctaatacgatagctgtgctttcataataaattcaaaagctgctctctatttctcaccagtttgaattgtagaaaagagtacaaaagattagagtactttaaaataaatctcagctaattatacatacaactgcattcactaaatgtgaatattttcaggctttctttgctaccaagtgccacctgctcatgatttaaatgggcacaaatttagttccattaaacaaaatgcagcaactcttctcctatagcgcaaactcctttaggtcctattttgaaactgagaagctaattccagtgttctcttgttagctctcggtccatgtcaaccaccccacaaggttgtttacttgaatagtttgcagccttgctttaaaagttctagtaggcaaataggtttgttgatgatgaagtggtttgtgttttataagagtccttatggtctagatggcatttgaacttgtggttccagtgattaccaggaccctgaattgaagaatacatgctgtggccttttcagctcaggaaactttttactttctattgccaaaaaaaaaaaagacaagaaatccttcctcaaaatgttatgtgttcttagcccatacaactgtctccccagaagtcactggactcaaacctccactttgctacttgaacatattaaggtcatttaaggagaattcattcatctcctattaatctggaacattcatgatcgctgtaagaccaaagaggacattttggggggtaataagaaagttaaagctgccttcaaatcaaacgtgaattatgaaactcttttccaagaagcttctattagtggcctcatcagctatgtttcaagaaaggaagttgaaaaaaaatcccacaacatggaatgcgtatttgccatgctcttagaaaaatggtttccttgcgaagactcctttgtctctacatacctggacctgaagaccttggtgttgttttataaccctggaagcctggctgtgatcatctattaaggaaggagaaggaagctgcttatctgtcctgaaagtcttatttctactcatcttctcgcctccttccacaccacctccccacctacacacacccttgccctaaattcctttccattttgtcctttcgaaaactcctccctcccttagaaaagctaaaaataatggtaatactttccagtgatcctcccttattaggatctcagatgcaagctgcaggcaaggaggaaagcctgcatggtcgctgctgctcacatctgcatggttacaaatcgtggctcactccagctctcatcttagatgttcatcctcacttgaatcccagtgccataacacgccaacgcgcctggaaaacacctgctgtctataggttgcaagcaccccacagcatcccagatgtagggtcatagactcagagaattgaatacacacccaaatcctctagctgtcattagggggagtttcacatgattgtagctacacccaggattttaagcccccaaaagttatttaggaaggattgcaggctcattcttgtgttcttaggagggtcccgacctgcggataaagacctagaggaagggggaggccttgaggcggagtcccccaagcagagccccaacttgtgtgtgatcctgcgccacaacttggccagccggcctggacagctggctctggttactgtgggaacaatgcaaggaaggccgttgtcacattcctctgaggtcaaaggcacaaccttcgtcacacactcagtccctgctggcaaagagaaagacgaggagcgtggaatcggagacctggagcatgcgagggacttgagaaattcaccaactcccttgttttactgattaggaaactgaggtgcagaggagagctatgacttgctcaggatggcacacccaggactggaattttctcttcatggtccaataccctgatgttcctctcatcatctccagtacttcagacttgatagtaaaaaaggattcttgataacattattatattttgttatgttttcccatgctgcaatcgagtctttaggttcgaagtgacaaccctgttacttttgttgcgagacccttgagtactcccaggacaaatctagccaacaaatagcatctttagtgaccctatgggaagtcattggcttctagccctaaacccagaggttagagttaatttttaagtgctcgcctttaactcaagcatgaagctctaaaagcatcaagtagtaatgcttgaaaacatctaaattcctctgagccctaggcatgcttaaactctctctctctctttttttttttttttttttttaggaaaatagctgaaatggtagtggttagaacacatgcaaacagaattactgaataaaattggtcacgtatcccctggtttaaggcatatttaggagttcaattcacatgtaattgatcattcttttttctcttggcatactttcctgtaagagtcttatgtgccctgcctttagcatatgtgcaagccgataaaggatgttcatttaaaatttttactattttaaaaatacacacagagggggaaaagacttgtcttatccccaaatgaaaagaattagaaataatacttttgcctgtaaacttctatcagttttcctgtcatgggaaagggaaccataaattactttttataaggaaagtggtggtgctagggccacatgtcccctcccgcacagaatgagaggtggtggtggctgcgggacggtgggaaggaatgagcgggacccaggccagagctcagctccctgggctttgcttgtctcgcattttgtaaactcaaatgtcccatcattcccaaaggccatttgtggacatgctgtgattttatgcatcaccttctggaaagaatgtgttccgttccctgtgaacttatccaggttgatacagtagttccccccaccccccatcttcggtgtcattttctgctgtttcaattacccacagtcaagcgtggtacaaaaacaggtgagtgccatgcaataagatattttgagagagagagagagacaccacattcacataacttttagtacagtataatgttatgattgttctattttattattagtttttgttgttaatctcttactgtgacttatttataaattaaactctatcatgggtgtatatgtataggaaaaaacatagtagatatacataaaggtactattcatggttttaggcgtccactggggtcttggaacagatcctccatggatgggaggacaactgtcttttgaatgtgtcagacacaattgtggcatttcttagtgtctttttcctactcgttagttgtatttggctgctgcaaacaccttgggctcccaagtagttgggaatgtggaaagctacatactttccctctagagagagccccagtgtgaaaaactaagatagccgtgtgtttgctgatccttgggacgagccagggaagggctccgggagcactgtgtgaattaaggctgtcaagaccaaagtaacataggagggagaagatgaaaatgcagcagcacgtctcttaatgtgatcgtttctctttccccttactgaagcatagtgctctctgctatttgaagagcgcaatttagatttatattaaggaatgaataaataggatgcggtgatgaaatctcatctggagtgaatgcagattgtggatgctaatgaccgtgtggctgtgcagagaacccattggaagcctgggcgcttctccctcctctgttcacccactaggcactcaagagcaactcaggcagtggggaaaaggttatctttttttaatgtctctcagtgttgcatcttgccttatagcgccttaaagcacttgacaagccttcaagtaattcttggtggtggcgttttcccccagaaggccttaagagatggttttaatagatacacctatcaatttattcccaacttgagcattttgctgtcttgcatcatttgacatcaccagaaagtcctttggttacttctgtagttcacattgtactttctgtcctttgagttttgggtgctcaggggcaagatgtcagaaatcctgagttttagttgtgccactgcgtagctttgaccaagtcactttacgttagcaggatacaatttccgtgttcattaaatgaggagactggactgaaagctcttagaggcctcctctagctcagacgttctgtaacactcagggctttctgcctcctctgatttggcggtgtcaggatacaggtccaagtgcggcactgtgccttgcaaaattgctctctctccctggccagcttttccaccactgtggaatgaagtctgccgcctggaagaatcccagatttctcaaaggcgtccagttctagggagcagcgtgcaaagcccttgagcacactttgacttcttctgccctggctggtgatgaaaaaccaggtcaccagaggttgccctgtttccagtgatcagccctcgggactgaaaaaggaacaaatacagaagagctccaaagaaagaaacagaaagagacgctcaagctgggaagctaagaacaggtccctctgctggggtggaaggagaaagaatcttaatcctctgccttcccccatgggtcagagtcgtaaatgggtgagacttgaaggtgtggttggtcaccctctctcaaagtttcagggctgggtcaggtgtcctagtagtgttgcgtggtgcagtagtgagtccccagcctgcattctgcaaagccccagaggctccccataaactttgaggctgtgggctgccctcagcctctattgaccggggcagcggggcagcttctccttcagctctgtgatattctgaggctatgtaaaatagttttcttagaaaggtcctgtggttaaaaaaaattttttttaaaccactggtttagttacgatgagctcatattcaaagcaatatgaccttagacaagtcatttgattttcccaaacctcattttccttatttcaaaacaagtttagtcatatattctcagcctgtctcccacagcaatttaaggattaattagagtcagttattcataccttcactctatgaacacggtattgaacacctttcagtagaaggctctgttgggagaggaactcataagtaaatacatgagacagccattccaagcagagggaaaaagcatgtgcaaatattttgtaaactgtaaaacacaacacaaacctaacattatgtaatattgctgttcttaaccaggcagtttaatatagtgactctagagcctaactccttggctttgaatcccaactgcagccatttatcagtgtgacttcaggcactttacctaccctcttgtgcctcagtactccaatctgtacaatgggaataataatagaactcatctcactgggctgttgggagagctgaatcagttccgggcgcagtggctcatgcctgtaatcccagcactctgggaggctgaggtgggtggatcacctgaggtcaggagttcgagaccatcctggccaacatggtgaaacccgtctctactaaaaatataaaaaattagccaggcgtggtggcacgcgcctgtagtcccagctacttgggaggctgaggcaggggaatcacttgaacccaggaggcggaggttgcattgagccgagatcatgctactgcactccagcctggtgacagaacaagattccgtctccaaaaataattataataataattaagagactgacacagagtaagcactctataatgtttattattggtgatttcaccaatgcactgtgaaattctgtttcttgattctcagcattgcagtcccctgtcattgcacttccagttttctcttccccagaagatgcatcccgtgttcgagcggaaaggcaagggaaacatcatgtcaagaaaagagttccgaacagtactctgtttctgtggcatggatcctctttcctctccttttctcctttttttgaggttggattggcactcctctcagacttaaacaaaggctttgctttgcagagaggatctttctgccttcggtgtgtcatctgcctctaagggtgtaatttgtttctgatgcatgcagggtgcccccttgagaaggctttgttgatgttgtgcagaggtgtcctgtattgatcggtgatagaactgttctatagtgggtgaatgaggtaattgtcatcaggttactctagtcggtgaccttgaggctgatccgatgactaagccacagaggtggatccctggttatagaatgtccttgtttaaaggtaaatcggtgtgagagtgactaatagttttaaagaaatgatggcaagcaaatggcatgccctttggtgagagacacagtctatatcaataagctctgaggccacccatatctgggtgagatattggggctgattttcaagggttcctttatctctctgctcctctcttatctcttttcattagattccaattctccataacttccatgaccgtgtataatacagtcactgccatgactgtgtataatatcgtcagtgtgaagttcagagcaaaatacataggcctctgagctagttggctgggtttcttttttcttttttaaaaaattcagcagtggggtgggacagagctgaagatgaaaagatgcttgatacaagagaagagagaaagcaagcgtcatgataaaatctgcatgcaaaaaaacccttgttataaaatgaaaagtggaatgaatcattagctatacatttaagctggatcaacacattagccctgtgattaagagtttctaaaacctacctgccagcatccctgctgttgctgaactggtcctttctgcatgggaatgggtagaagtctaaatgaacagacttagagtgggttggcaggtgaaggatagtgggggtaagtagtgaggagaggataggttagaatagttattttgggctgggcgcagtgactcatgcctgtaatcccagcactttgggaggccgaggcaggtggatcacctgaggtcaggagttcgagaccatcctggacaacatggtgaaaccctgtctctactgaaaaaacaagaattagccaggtgtggtggctcatgcctgtagtcccagctacttgggaggctgaggcgagaggattgcttgaacctgggaggcgtaggttgcagtgagccgagatagtgccattgcactccatcctgggtgacagagcgagactatctcaatcgcaaggacaaaaaaccaaacaccccatgttctcactcataggtgggaattgaacaatgagaacacatggacacaggaaggggaacatcacacaccggggcctgttgtggggtggggggaggggggaaggatagcattaggagatatacctaatgttaaatgacaagttaatgggtgcagcacgccaacctggcacatctatacatatgtaacaaacctgcatgttgtgcacatgtaccctaaaacttaaagtataattaaaaacaaaaaaaagattaaaaaaataaaaagaacaattattttggaatcattgaataacagtcagctctttgtatgttggtcaataaaagcaaacacctataatactgctctaagtgctttgtgctatattaaccctttaatcctcacaacttttgttatgtaaattttatatctgaaaacagtgaggttaagtgatttgcccaaggtcatttaaacccagatattggctctgccccggtgcccttaacacttatagcctctcactgtcctgggtggtgaaggtcttgagggcaaagagagaaaggaaattcctattttcagtggacatatttcttgtgccggtggaaggaatttaattattacaaggggtttcatcaagtgcactaatctgggaagttgccagcaagctgacctgggtttaagtgattctcctgctttgacctcccaagtagctgagattacaggcatctgccaccatgcctggctaatttttgtatttttagtagagatggggtatcaccatgatggccaggctggtctcaaactcctgacctcaggtgatccgcccaccttggcctcccaaagtgctggtattacaggtgtgagccaccgcacctggccaagacaccttttttagcttccaaatcgaagtctgtttttgcctgtatcatggttgtatttcagttagaacatcatttctttttttttttctttttttctttttttcttttttttgagacagagtttcactcttgttgcccagactggagtgcagtggtgcagtctcggctcactgcaacctctacctcctgggttcaagcgattctcctgccccagcctgccgactagcagggattacaggcacctgccaccacgtccagctaattttgcgtctttttagtagtgacagtgtttcactgtgctgaccaagcccatcttgaactcttgacctcaggtgatccatctgccccagcctcccaaagtgctgggattacatgcgtgagccaccgcgcccggccagaacatcccaatacataggcagccacttatgcactagagtccttctcggagggtgagcagagttggctctccctgtcggtggcatcacgttggcagaatacacacacttttatcctgtggcggttggcgaggccattgatttgctgcgtagaatagcaaggaaatactctagacaggtttaacatttgttattgctaatgaatttgtcaagcatcggaattcagggacggttgatgcacacttaaaatgctctgaaatagattttaccttttataaaagataataataatctcatgtttgaatcacaagaggtacgttttccttaaatcttttaattaactcctatttcaagaaaaacctcttatcaaaaaaaaaaaaaagattttacatttcctaaggccaagtaagagttgaaggtagaatgagtaaataaccaagtttatggaaattgtaaaataaatacatgtgttataaatgtgctatttaatgaaaatgtgtattgactagagcaataatgatgtatctttgaccatgataagtaccagtgctgaaatccatccaagccacaaaaatgattggagggtccatgtggaatataaagctctgcagagtctagagctcatatcctatatggctttttgctaattaataaacattggccttttgtctattatttaatagcctaattgcattgcacattgcagtagcacattgcaatagcacattggcaaaagtgctgcctttcactgctaaggggggcagttttctgtaaaagaggttaaaaggagaaatcagaagcctaatttttgttaaatgagatgtcccccaaaagtcagatacatgcatatttgggctaaataaatctttcctgggaaactcttctatgactgggcagagttgttcacgagagactttccccccaacattttattaggaaaaattgcaaacatacaagtaaattgtaagaattgtacagtgaacacccataaacttgccacctagattttgcaaataatattttgctatatttgctttgtcaggtatcaagccatctgtccatcctgcagtccatcatgttttagttgatgcccttcaagactagttattgtgtatcattactcaatcaaaataaaatattggctttagttcttgcttttaggtaaattttattttattttattattactattattattattattgttgagacagggtctcactctgtcgcccaggttggagtgcagtggtacgatctcagctcactgcagactggaccttcggggcttaagcaatcctcccatcttagccccctgagtagctgggactacaggcataggctaccacatccagctaatttggtttttggtttttggtttttttttggtagagtcagggttttgccaggctggtgtcaaacttctgggctcaagtgatccaccctctttggccccacaaagtgctgggattacaggcgtgagccaaccatgcctggccagaaaaacccaaattgagggacagtccacaaaatgattagtctgtactccttaaaattggcagattgtcacttttatcacatcatatgtgacctatcatgggctgttgatcttgatgacctcagccgaggttgtgtcagggtttgtcaactttaaagttactctttgtacacagacacactcacacacacccttttccatactgtactactcgttggaaggaagtcactgtgcacagcccacacttaaggggtgggcagttacgctctacctttacaagggcagaacatctgcatgaattatttagaactcctttgctcaagagatgcgtgttttcttcctcttttaaaatttatttatatcaatatgaactcatgggtgtttattttattctttaggttctaatccagtactatgttgtttattttgttgctctggttgttttagttctggccattggcagctctttgagaaatattaggaatattgtctcttgtcccccttttatatgcccccatcactgtggggtattgatttatctatttagcattttcccactttctgatactacaagatgctccatgctcatcttggatattccctgtcacagtactagaatcagccatttctccaaagacccctggtttgttttattggagaatggtgttaggaactaagttctgggtgctggggcttgcagaaattttatgcccaacacatattagctccccctcttccttttgtgggagtttggtgtgtgcagtagtgagtgccctgtgaaatcttcatgctacagattgactttagtccctcactgatcctagttcacttcaggaggagcctagctcactgtggcagactagacagaaggcagcccagccagtcaactcaacagatttcatttattcagctcaatccaagtcagacttggtgctgtgcttattcctgtgggcagatgccctgccctcacagacccctgccctctagaatcaaatgacaggacagtaacagagaagtgctgtagaaaatcagaatacagaagggctggtgcgacctagcctaagagcattcaaagaaagctgtttatacaagagcagacttaggaaggtttattccagatgaggaggctagaagcaaagacatggaagtgggaacagatagtctcttaaatatctatggataagaagaaagccgaaaataatgaaggactttgcttcttgggtttattttaggtaggaagtagggtttactgatcttggtgggatgaggaaatggaccagtggtgtagtggagccagcttgcacttttatgagccaagtgttaaatgttcagaaatttggggagcatgttgacatcatgttattaccttgaaattggccatggtgggagtgtttacactacagaagtctgcaaatgctacacatcaggggtcctctctcccctcccacttttattaaacatttctgcacacaccactggcttcagctgtctaaatatctagtatgtacccttaccctgaatttatttttttttcctctagtagtctttttcaggtacacatttttatttggtgctttgaattctctaacaaaactgtcaaaaaatggttacagtagagatgtgtgcccctgattgaaaactgcattttactgcatattggttaaaactcttaacggtcagaaaattttttggttaactgggttatttgggaccctctaatggccattctcaataactgagttggaaaagtgcatgattcaaatgtactaaaccattacccagccttctactttattttggcagcatggggaaacctgttgtcacctgaaggtagtcatcagtgtcatatatatgtggtcataggatttatggttgggctggcttggaggtatcttctgattcttaccaagaatataggaaaaaacgatatcattttctttcagctgagaaaccatgactcaacgttattctgcttgtagtaggcaatgcaaccctgtatcagtttgacttttgcaaggatgatacctgagtaatccagggaatagtgctatgcaaatagggacagtttccatgaagtcacctcttgtgcatggtatatggtgttaagtgttatgccgaattagactcagagcagcttacatttcaaacgagtcacctaaaagcagttatatgcgtgacgaaggagaatggttagggaaagaagaagacttctcttactcataactggagattgtgagttttcactgtgatcctgaaagataggttggctttgccttaattacagggatttcttttacctctttgccctttcctatgtccctccatcaggtatggtaaattttcctagcttttgttcctattagtgactttactcctgatccactgccaaattgggtctctgaggttgtaaaactcagaaaaggatattgcaagcattctggccatattacaaatctcatgtgagagctcactctgaatcaaaggagctctcacattcttttttagtccaagtgattcctagatgtggaagccgatttcctggaacactcaaacgaggtcacagttcatcagctgcctcccataaaccaaccctctcaagtttcaactctcatttgaaacttcttgggatatcttgatccaaacagatcacctgaaaagctcccttataaggtcaagtgatcacaggggtcttcttcttcttcttctttttattgtgataaaattcatcatttttcccatttttaagtgtacagttcagtggcattaagtacattcacattatattgcagtcatcaccacgatccatcttcagaacgttttcatcttcccaaagcaaaactgcatatccatgttgtagcatgtgtcagaatctccttcctctttagggctgaataatattgcacatatgtatcacattttgtatctattcatccattgatggacacttaggttgcttccactttaggttattgtgaattatgtggctatgaacactggtatacaaatatctgttcaagtgcctcctttcagtttttttgggtatatacctagaagtggaattggtgaatcatgtagtattttttaaattttttgaggaaccatcatggtatttttcacagcagctgtaccattttgcatttctatcagtaatgtacacagagttccaatttgtccacatccttgccaacatttgttattttcttgttttgggggttgttttttttgttgttaatcagagccatcttaatgtgagtgaaatggtatgtcattgtggttttgatttgcattttcctaatgattagtgatgttgagtgtcttttcgtgtgcttaatggtcatttgcatattttctttgaagaaatgtcaattcaagtcctttgcccattttttaatcaaggtatttgttttttgttgttgctcaagagtcttcttgcatgcctagatagtacactacttcaagaggctatttagcatttatctggggttccatggggcagcctgttccctttgcacatatgtaatgcagagatgaatatgtagagacttaccactggaaaactgcacctggaattctcagatttgcccatatctgcttatcatggacgaggttcagtggtggatgctgcagaatataccaccgactgcttttggctactgtgtgacattgtcatctaacttttcactaagaaaaataatctctttagaggaaaggaaggaagttgagagtccatcttataatttttcagtgtaataatattctagaccaggtattgacaaactggaccatgggccaaatatcaccccagcctgtttctgtaaattaagttttattggaacaccgacatgcctgtttgtatgagtatcttcaattgctgcttttgcacgacaatgacagattgagtagttgcaatggagatgtctggcccacacagcctaaagcatttgctccctggtcctttatagaaaaagtttgccaacctttggctgttctaggtgtttaagaaatactatttttagaaccgtatatataatgtagtgatgttgactgcaagctattcactttgaaaacaataaagcttatgtagtagatattactgttttaagtatttactgaataagatagacccctgttacattactgcttttaagtatttactgaattccaattttgtgtccagagctgtgttctttgcctttgttttttgattggggcaatggctttcatgtccttagcaccactggggctgttaccagatgtgaccaaaaggtttctaacatgggtagcactttttttttttttttttttgagacacagtttcgctcttgtttcccaggctggagtgcaatggcatgatctcggctcactgcaacctccacatcccaggttcaagcaattctcctgcctcagcctcctgagtagctgagattacaggtgtctgccaccacgcccagctcatttttgtatatttagtagagacagggtttcgccatgttggccaggctggtcttgaacttctgacctcaggtgatccactggcctcggcctcccaaagtgttaggattacaggtgtgagccactgcgtcctgcctgggttgcactttttaaagtcacagaatctgaattctgcctttcctctgtgatatttcctattcgtactaaactttggtgaagtagctctgatctttagctgtggtgagaggagttatggaagagggacctgccccgaaacgtagaccacaggcaacttgctgcctggcaccctaaagatggtttcctgcttctcttcccctctatctccaggtcagagatgcagctttgctaaggcagtgattgccaatttgggaattttgagatactgtggatgtgctgattgttttgtacaaattctcttcaataccttgaccatgtatacagtaaacttatgctagctgttagaggacttattaaggtgtatggacactgtctttgaagagtttatatggtatgttttggcagttgaagagtattaagcattgacttaaaaaattatgtataataagcattgagataatgggaaagaaatgctacacatacacacacacgcatacccacccgtgaacacagacacccaggaaatcataaaacctgattgacttctatgtgtggatgttttctttttttattcatttaacttatattttaagttcagatgtacgtgtgcaggttcgttatataggtaaacttgtgtcatgggggtttgttttacagattattttgtcaccaggtactaagcctagtaaccattagttatttttcccgatcttctttgtcctcccacctccaccctccagtagattccagtgtagatgttctcttaagtaaaacgatggggtagtcgttttgtacagtccaaataagattccgacaatggatgaatctgctaagaggttaccttttgctccagatacaatatttatctaaaaggaaaatgaacccttaacccttccatggaatcgtactgcttcactaactttttgagtgaagtgatgggcattgatacagtattgaaaactttcaggcccttttctttactttttgacaatttgaccttttttcacccctgaaatatagcaatcagtatttctcttctggatctggttctacaacctacgttgattttaattactttccttgaaaaccattctcaaaatactctctgccccttacattttaagctttaatgttgaaaatagagctttggtaagagtctccttgaaaatgattttcttcagccaatatcagaggagtatttccttatttttatatttatatgttttaattccttaagaacagatatctaccaaatttcatggtatagatttataatcatcttttcaattttagacaaattttggaattcagatgttgctctttgaaatgctggtgacttctccaacttggggacattcacggactcaataagcatgccttttatttatgattctctgaggattcattcatttctgcatattttgaatgtctgctacacagagataaatgatgtaaaatccaggctatcagagctgggtcacaatttagtggagaagatgagtacgacaaaaatttaccatggagtgtgaaaagtgctcctcatagagacatgtacatcatgccatagtaagtttagggaatttggaaactcacttaagtcctaactcaatttaaattgtgttagactgtggataaatttatccgacgagaaacacataataatatgtatctactctgaggtaataaatgaaaaaagttggataaaataaaatacatctgttataaccaatggcccccagcaaggccagtgctcttgagccattattattcctgcacattctttgtgtttgggttattaacattgcgcttaggtcagatgagcgggtgttcaatctgccacactttgataactaaagtaaaatgctgatggagatcatttaagactgtctctatgctgttgattgcatgcttgtggctcataatcagaatgatgcaaagtaattgttagactgacttgccaaggctacattttgtgtcgttgccactgtcagcactttggtcccgctgtgctgcctgaagaacgcttgcctggcacctgttgggcactaatacacaactttccactgaatgtcatgggtaacttttgttctcatatcctcgcttgctatcttcacaaaaaaaaaaaaaaaacaaaaaaccctgacaaagatttttttttttttgacagagtcttgatgtgttgtccaggctggagtgcagtggcacagtctcagcttactgcaacctccacctcccaggtttaagcaattctcctgcctcagcctcccaagtagctgggattacaggcacacaccgccatgcccagctaatttctgtatttttagtagagatggggtttcaccatgttgcccaggctggtctcgaactcctgacctcaggtgatccacctccctcggcttcccaaagtgctgagattacaggtgtgagccactgtgcccggctgcaagtgcttattttttgtttgtcagaatgcttatgtattgagactttaatctctcgtgcatgttgccagggagctcatcttttctctttgaccgtgaaacccagacaaacctagctttgtcacttactggtgaccttggttaggttacttttcttgagccttattttcctcatctgtacaatgaggccaataaaacctattttacagagattttgtcaggattaaagataatagataaaaatgtgtccatacaaattagccactcagcaaatggttgtggcaaatattaaggaatttaatacttactcaggatgatacaatacaacgacaagacaacatttccaaaagttagtccgaaaatataatgataacgtaactgtggaacatgtagtatcagcacggttttactgggcaagtcatgtttaccagagacacacaattggatttggatgttaaaatctaaaccgcatggttttatggctagatctggaatacatgatatgttatgggccctcccatgtataccttcagaggatatggagctacctttggaagcaatgtatgatttagtgtttttctttttttttttttttttgagagggagtctcactctgttgcccaggttggagtgcagtggtgcgatctcagctatctgcaacctccacctcccgggttaaagagattctgctgcctcagcctcccgagtagctgggattacaggcgtgcaccaggacacctggctaatttttgtatttttagtagagacggggttttgccatgttgcccaggcttgtcttgaactcctgacctcaagtgatcttcctgccttggcctccgaaagtgctgggattacaggcatgagccacagcacccagcagatttagtcttgatggtgtaaaaaagccattgtatagcacacaacacagcctgaccatctaatgctcactcatgtaaaagcggtgaccacgagagagttgggcaaagcaaaaactctgtccctataagaagtgcattgttagatctggaaacatctcaccaggtcctgaattgtactatgaaaagagatttgttaaaagtagctcagttcatattccatgatattgcaaatgcctagagtgaattgtcaaagaaatgctctctctgactccatccactgctgacatttaaggtctgtgttcttagttcccaacattgattctatttcacatggtcaaaatgtaatagacatgttttttctaagagcatgacccccaccacaaattaccactccccttaaaaattgcatcggctggaccagggatgaagcatttagggagcatttgttgtaagggactgtcacctgccattggttatggaccttggtttcacagatcagactctgtgttgctctactttgcatctccgcctttgatctcgctgggattttgcagccagtatctatctcctttggcatttctttgctgctgctatgtgttctttctccctctgctgctctctgccagccccatctcctgcctgattcatggagcagtgttggatacttagaaaaggttaactgcattcgtgtctccatggctggagacacgatttccacacactctgcccattgcggggatatgctcacttccccagcctcccctcaaaagtgagattttcctggaatgtcactagtcgcggggggaggtatggcacccttaattgagggcaaggatgtgtcatgtgacttcagcaaatcctatcacatatatttttaccaaaccaaccattctctttgagaaggaacttagattagaaatattaacactgaatgaatattttaatttttgataccttctaaagaaatatggtaagtcctgattttttttttttttttttaggttttcaccttcaaatagtgatttaatttctaggatcactcaagatcatacagttttttcagttaactttcctctgtatcattaagtaactctaccatgattgggctgaaacaaggacatttgcttgacttcagacttagcgatttaatacttgatctagccatccctattcacccattatcccgagtctttaaaattgagtcctttttcgatatgttgaacacccactgaatattcttttttttttttttttgagatgaagttttgctcttgttgcccaggctggagtgcagtggtgcattctcgactcactgcagcttccacctcccgggttcaagtgatcctcctgcctcagcctcccgagtagctgggattacaggcacctgccaccaagcccagctaatttttgtatttttagtagagacagggtttcaccattttggccaggctggtcttgacctcctgacctcaggtaatccacccgccttggcctcccaaagtgctgggattacaggcgtgagccaccgcgtccggccacctactgaatattctaatgtgtgattctattccctgtggtatatgtgttagtttgtgttcttctatgctacacccactcaaaccaaaacaactttttgctgttaaggctttttatatttattcagcctgcctttctcaatcttgaaaaatgtagaagaaaaagaaccacatgctaccacaatatgtagtcacttcttataaacttgggacactttggtagactctgtaaattcaacaaataaatatgtattggttcattccttcaatgtaatactctttcagtcctcaaatgttatgatgttgatacatctattgatgttaaaggaggttttcaatataattaataagtaaaaaaaatgagacagcaaaatactatgaatactatcatagtacattataaatagattgtatgtatgtatatatatatatatatatatatagatttatttctatatgtatgtgtacaatatactctgtatacttgggcataggagagagtctggggtcatataaccagactgttaatagtgattattagtgggacttctgtggatttgtattacttgggtttttctatttatctaattattatacagtgaacagttttattttgttctcatttgtctcatccactttttttgactgcatagtcctgtaatttttttttaatttttaatttttttgtgggtacataggtgtgtatatgtatggggtacatgagatgttttgatacagacatgtaaaataaacacatcatgaagaatggggtatccatccactcaagcatttatccattacaacaaacactccagttatactctttattttaaaatgtacagttattattgactatagtcactctgttgtgctatcaaatagtagatcttatttattctaactactttttttgtacccattaaccatccccacctcccctccagccccctactacccttcccagcctttggtagccatcctcctactctctgtgtccatgagttcagtaggtttgatttttgaatcccacagataagtgagaacatgctaagtttgtctttctgtgcctggcttttttcacttaacataatgatctctcgttccatccatgttgttgcaaatgactggatctcattcttttttatggctgaataatattccattgtgtgtatatactatactttctttatccattcatctgttggtagacatttagattgcttccaaatcttagctattgtaaacagtgctgtaacaaacagaggaagtgcagatttttcctcaatatactgatttcctttcttttgagtatatacccagtcgtgggatttctggatcatatggcaacttgtctcatttacttgtgaggggtgaggaaaaagggaatacagtacaggtactcacattctggtaatttttgttgttgttgttgttgtttttgttttgctcttgttgcccaggctggagtacagtggcatgatcttggctcactgcaacttctgcctcccgagttcaagcaattttcctgcctcagcttcccaaatagctgggattacaggtgcatgccaccatgcccggctaattttgtatttttagtagagatggggttttaccatggtggccaggctggtcttgaactcctgacttcaggtgatccacctggcttggcctcccaaagtgctgggattataggagtgagccaccacgcccagtcacattctggcaaattattaagtcaccaaagtctctcctgtgtctttcctccattgttacagatatatgaacatgttgtgtgccaaatggtgataatgcctttttgttttattcagtctcttctgtgtaccaagcgccacactaaaaactagaaacattctatgaagtcgatattgttattgccattatacaaatgaggaaagggttcagagagtttaagtaactggaaccacacagctcctctgtgactcagctgaggctcagactgaggtctgactttgaaatcagttttcgtggtctcaagaattcgtactgtagacgtctcgtctgttgttaggatgaaaaggtcaatgcgtgtgagtggattataaagtgttgctttaaaacgaagaagatactcagagattttgccagtatctaccatttttcaatgtttgcatggctttctggcagtttttttcaattggagcataacctttgtctttgcagccccacctagcctaggatagtctgactgcatagtaagtgtcatgttaaacacttgtgggctgctctgtgggacttggaggagtgcccttcagattctgaggaactgagtctgggaatcttcctgcaggctggtgggccatcctgaaaaagctctatcctgccctggtggccggccacatgccgtccacgtcctctgatgaaaagggcgggaaagctgtggccttccacagctcatagaatgaatcccaaagatgctggaatcctgggaaacttgcccacagaacatcaggagctggaatagctttgcctcacagcctctcttaaacctgcaaaggcgtctttaaaatagtctctggagattattgttgagttggatcttgaacttagttccttgtgtggtgtagattaaatagtctgttgccgtcgctcccttatctccctttctttcaggcttcctctgtccaacattcacatcatctctgttctttcccacactttgtttggcccgtcagtatctcagacactgtggcttcctcacgggattactcagtcagcctgatatgtggcctccagcgcccctctgccaagtccacattcccatatgagcctaattacatacagatcactgcagggagtgaagctgtgggtataccattttgggaaagagcaaagtgcaggaatggggtactttggttatttattaagacttcttcacagcctggcaatgtagcaaaactccatctccgcaaataaagaaaaaacacaacattttaatccaggtgtggtggcacatgcctgtagtcccagctacttggcggctaaggcaggagtttgagtctaggagttggaggctgcagtgagctatgatggcatccccatccacggtcactgaattcccccatgagagggactttggagggaggatcccagggtctgagctcagctctgccactcacagccatgtgcacgtgagcaagtggctcagtcccctgggcctcagggtttccagctataaaatgggcacggatctatgacaaacccgggtaacaaagcaagaccctatctcaaaaaaataaaacacggctgggtacgatggctcaaacctgtaatcccaacactttgggaggctgaggtggaaggagcgcttgaggccaggagttcaagaccagcctgggcaacatagtgagaccccatctctacagaaacattacttcaaaaaaatacaaaaaaagacttcttcaataagcatcatggtgggcatggaggacatgacattttaagaaaggcacctaaaaaattgatttcttgggcaccacaatatggactccttgtcacaaggaccatacatctcatgataaatgaatcatgcctgtgattgttctctacatattgattgttcaaagctctgcttttaaaattcatatagtcagccaaataatcacgcatctattgttcttcagacatttattgtgcacctaataaaggccaaagtgctaggggctggaatttcttatcacctctaggcctgctcatttggactgatttagagaatggagttattaatttttttaaaaaatctttttttctattccagttttccaaagaaattagaccattttcttcgtgagaaagaaatcgacgtgctgttttcatagggtgagtgatcctttgaatctttcatgtatttttacccacatcaaaatattatccaattactatgatgcaccaagaaaaagtgtgtgacagcatgcactctctagttttctcctgcttggaaccaaggtatttttcctattctttgactctcctcatcactgggtcctttggagaggatggtttcccttgtagatttttctgcgatttcttttttgccgttcacatgctttgcctcgtgcgaggtcatcattgttgctattaccttgtccagctcacagaaaggaagtttctttccctcagcaactggtgcacagagatacagctgtaggcaagggggaaccatccagtttcaagtgactgtgatgtcttttgaattccatgaccaagaataacaggatatgagcaccagatgagacctgagagcttgtctggcaaaggccctatgtacagatggggcatctgaggcccagaggctcacatcacctttatggggcttcatggagagtagcagagctaggattttgatactggtgtgtttggctcctagctgcatgatgtttgccctgcacaagtctggttttggaatctgcagattctttttgaggctgtagagttataggtagtttaacttaatgtggtcttggtaatctaataatgatcacccctaaggcaagggtcaagactgatactgatagactatttgactttctcataatcctagttggctactaagtaaaggggttggcagagtgagtgcacccagaacacttctgttatggatgtcatctgagaaagcttattttcttctgcgccctttccaaaccactgcatctgcaatgccacgttgtcatgtgctgagacttggtggtacatctgctttgcagctagaagtcatggtacacctgcaggtgtgtgcagtccagctgcagacccacacacccgactcgcggttgtctgcacctgcagaagaatggctaacagggttcctatattgaagtacaaatctgaccttcatagagacttttgagaaacatttattcttttattttatttgtttatttatttactttgagacggatctccctctgtcgcccaggctggagtgcagtggcacgatctcggctcactgcaagctccgcctcccgggttcacgccattctcctgcctcagcctcctgagtagctgggactacaggtgcctgccaccatgcctggctaattttttgtatttttagtagagatgggtttcactgtgttaccaaggatggtctccatctcctgacctcgtgatccgcctcggcctcccaaagtgctgggattacaggcgtgagccaccgcgcccggccccatttattcgttttttttaaagttatgttggtttttacataagagtgcagttgtgcaataagatggagagaagttaagaatatgattctcagttagaatcccagaaggtaaacttgactgtgtgtgtggtttgtttgtttgtttgtttgtttttttagacatcctaggttaaatctggcttcaaattgtgttcatttaggttggtgaactaagtgcacttatttccaaaacatttcatctcacctagggagtggtcaaagggtagtattaagagcttgtgtttattattttatccaacttgtcagcttaatcactttgtcttcttccctaactagagtcattattgcggaacttgatcatctccttatgtacatacagacgtaattggtgtctaccaacatactgaatggaatgtagaacatagattgctgatttgtgagggatcatctgctgagttaccctaacattgatcgctcctgtccacagagctgggtctacacgagttagcattcattagaactgtgaaggtttccattttcctgtcttatctgagaaaagcccaaaaagtttattctcagagcacaccacagtacaatgtgggtcactgacacctgttgctctctggggactgtaaaggtctctttagagtcaagagattaattagactaaaagaagggggcaattaagggccttgagaaagtgaagaaatgtccatttccatgcttacatcataggattctttgggtaaagaataaactggtagagaagggtctgaggcaagaaatggtgaaggaatgaaagaaggactgcctgaacccatgtagaccacttgtggctactttggtttccttctggggtcatgagcactttgatgttgacattcaagagggcatcaaattattatccaaaatattacaagccgtaatttttttattttaccaaatgagaaaaaactaaacacagatagaagccatgagtatttttctccctaaaaagaagctcagaagctggcccccacatgcatatataccttgtaaaacgtgagtccctgggctcagtttcatggtatgcaatggggctgggtcttgggaacaatgctgctgttgtttctaagctcaaacagcactcaccatcaatggtatctctttaagggaaatccagggaaatgctcttgccagcgctgtgattttatttgctagaggccaggtggcaatgacatgcattggttccatagcaacgtgactgtgctgccagaaaacatataatgactgtgacagccagtgtatcctgggcaggatgagggcagccctgataccctcttttatttcccaccttatcctctcttgcctttcccctcctggggcctgtgatatgcggagaatgtggttttcgtaatggttactatctactcttgctattaacacttgcctcctgtctcggtccatcttggaacttgatgagagacaaggcaatgcctgtaggagtgttctgcaggcctctgaatgggtcagcagggttggcagcacctgcctgtcttagcaattgaaaggaggtggagagtctgtgcttttcatcctccctgtgtgtggcacagcggctctgtcagaatgacctggtggggagggtacttcctgggcatcgtggtcagctgctcctggctgaaatgtgtgggtagtgacatggagcaatgtgaaatccagggaaacagagtgctcatttaatatgctgcagattgaggagacacctaccagtggagcctgcaatgccaggcccagtaggactgcacagagaaatgcaatacccatttctcatcttctgggagctcttaccagagaggcagtttctaattgcagtttctctactgatgtgtggttggggctttcacatttctctaatgtttcctcatctatataatccttgatgaaagaattgtaagaactcttagttccaacggatactttttttcccctctgaactcctgaagcatttttaaaaatctttaccatccatttgacattgctcttgtatttccttttttcatatatattgctttgggggcctgagtgttttctaggtcgaggctaagcccttcaaggatacgaaacatgtatcttcttcttcctcttaaaaaaatttctctaatgctcacaactgagttctgcagatagtaaccatgacattaatatttgttcacgacaacgttatattctcactccatctcccaaggaaattgtgaggcaagtgtgtaaatatattgaaaatgttgttcagttcttcaaagaaaagataaactcaagaaattattttcctaatgtggtttttttaatgcagatataaagtcacaaggtaagaatatctaaaggcttcatatttcctcatcttcctctttctggctactgaccatagcatatacccctgggttttatactggcaccaaaatcatcctttttcccacctcactcccaatattcactgtattgaatttgtctttgggatcagacttctcagtctagcgttttggactattaagtaagagatttgagggatttttccattaagatgacagatagattaggtttgatagattaggatagtgattcctaatttggttttgaggtctgtttaggggagggaaggtttttatcttatggaaacttttatcttacaagagttctcttcccgtcccaagttctgagcccactgagaaataagacaagagtattgaggcagacgggggccagaatgcaactatgtgactgagggcaatgagctaacttgacacctgcctgttccccagtctagcctggtcgcaggccacctgcaggaaagttttgagtctacaggcacctgtctgtgtgaagagggaaggagaaagaggcccaaatccctgctaaccctgctcaaaattatatagattcaccctatccaaggagggggcataggccacgttggctttagccccagccgggttactcattccacacccttggggaagaaaaggttggagcaagaggtcagagggcataagggaaatcctcccccatagaaagctggggtggggcgtggcgtttccttcctgctctggccatatttctgctccctgcaccccatcaggcctacccgcccccagctcactcaagccttcttacctgttgttttcttcgtggcgcttgggcttctgcatccgactgctggtttattgttagtctcctctattagaattagctcagtggaagcaaaagccttgtcggtctcatggactgcatgtatcccagtatttaaaactgtgccaagcacataggaggcatttgatcaatatttgttgaatgaataaacacatagatgttgtttgatgcctctgctcacactctttaattacctggacatccctggtgccctgtcttgtctggcaagtctgtaggagctagttcagcaatcgtggtctcttcttgctctgtatgtagctcatcagttggcagtagttggcatgtgtgcatgtgtgtgctctcatgtaggtgagtgtgcatgtgtgtatctttgtatgcatgtgtgtgcacctacatacctgtatccttttgtgcatatgtatttgtatgtacttgtgttctctctctctctggctctgtaatacttcacttatttgtttacatatcttttacccttactagattgcaaatgcttgaagaactggggaacctgttaatcattcttgttcctctaatatctgccatgtagtaggtgctcagtatatgataatattagcattctaagcacttacaacatgcccagtactgctttattttaaaatttaaaataacttttatgtatcttgcatatattaacttgtgtaattctcacaacaaccttacaagatacattttaaactcgttttgtgggaaaggaaactggggacatgaagaggtcaagtggctggcccacagtctcacagctagcctgactccatagctttttttctctgctacctctcagaaactgactactgtatttgtgtgaatgaacaaatgactgaatgagaattttagaagcccagaccaaaatcattaaatagacctaaagacattagggtcaacacaaataagtaaaaatgatgagccatggttgacacagaatcaaggccatggctaagataaattcacagatgaatagctaatgccttcttgtagccattgcacttaattcctgatgatccatgcctgcatggtggtattggttaatgcaaatgaataattgttattacgtattgggaattatttcctagtgggaaaatatcaagtcatcagttatgagttaagcagctactgcttgcgaggctcacaactaaattttggggaaaatgatgagaggaaggaaaatgtgagttggagggtgaaaaggtaagccctgaaagtacaagccaaggtcactgtcttcaagaggctcttgtctcattaagtggcaaggagtgagtaaaagtgacattaaggcaattaaaagatactgagggcagtaaatataaagcctagcacaaggcattgttagacatgattcattaccaaatggtaataatagagaaaataaaagctattgtattagtcaggataggataagcttttgttgcagaaaggtcaaccctaaactttcagtagcttagcaaaataaaagtttatttctcattcatacagtgaccgctgtggatgcagtatctctccaggacaactgtcctccatgcataactccatgatgcagtctgctttgatctttttatccagccatctaggggcctctttcatgatcactggaagagagaaaaattggaaaattgcaccagcaattcaatgcttcaaagctttggcctagaagggacacttgtcacctgctatgtcctaagcatggcttttagctttttgtataactcccaacgtcccagtcctctcacacagcacacagtaggtgctcgataacgtgtagggtaaaagaatgaatgaacttaagaatgcattgtgacttgctcctgatggtgttgtagcagtaatatacctggcagcccccaaagcccaggcttggaacagtcagatctggctcaaaaatatttactaaaattaaaagagcattaataaaaataacaacatagttaacattaattagctatggtgatgggacaatcataaggacacgggcaaattaaactcaatttagcaggtggctaaacttacgctaaagccccggcctgccagacattggccttgtcttagacacatcactgtctaacagtccagagctcaactcacagttcacaagtcatctggtcccatcttgtctttctgaccttgttcctcctgaatgagatggagatcattaggcttgttaaaaattaagaagctttattaaggcaaagttaacctgtctgggatgcttccatgattccatcccaggtgtatggaccaccctataccatccccctcctgcatccgcttctctcatgctttcatctttcatctggggtcctggtgaacagaccacaattcagctccagatcaacgaagaggggcttccagacaggggccacgcatatgctgaggaaaacacagcaatctaacatgtaaagtaagtgggaagctccgtgtaggactcaacacggagaatggacagctcatagagagaaagggggagactgccttggacagggagataggggtcacaccacatgtgtcagaccaaagaatggggacccctcaaccacattcgctacgtgtgtattatgtggtgaagagaaacctgcctgcgaggaggactgagtcccagccactgacagattcccaggacacggtgcttcttgttggtttgtggtttgggggtggtagtggtagggagggaggagtggtcactgtgtaaatgggcagtgctgtggggaggggtcctgaactgggggttggcagtcactggagatttttcaacaagttggggatgtgaagaaccatgttttagtgagatgagctttacagctgtgtccatatcccgtgagatggtggagaaaaaagagactggggtcccagagggaaggcagttgcaggcgtaaggagataaggttttgagaactactgtgggcgtgttacaaagggaccgatgtggaggacactacaaagaaagagttgaacaaactgagcaactgggtattagaaacaatgaaaggaatggagtcagagataacccaatttttgagcctaggtggctaccgaaggtgtcctgtgttgtactttatggatattattattattaattattattattattattattttgagacagagcctcgctctgtcgccaggctggagtgcagtggcgtgatctcggctcactgcaacctctgcctcccgggttcaagtgattcacctgcctcagcctcccaagtagctgggattacagcctcccaccaccacgcctggctaattttttgtatttttagtagagatggggtttcaccatgttggccaggctggtctcgatctcttgacctcgtgatctgcccaccttggcctcccaaagtgccgtggatattattttaataacagtgtcatcccatgagatagagagcctgtggcagaacccagggattgcctgggacccagatatgcccacgtgagtatctgagttgccttaaccccacctcccttccttcgagccctccctccccaaggtttaggatcaaatcttaaatcagcagcaaaactgccaggctgaaatttcatctccatcctggccctctagtggagataaaatggtttgaatgtgggcgagaaagtaaaacggaatgtgtggttgctgagtctagctgttgataagagagggttcaccatccacccatgagaactgtctctctcctgctggtgtgcctcgctctcagacgcagcctccctatggctctgggacatgaggggtaatgtcttgccggttggtaaaattcttgcaagctgacagtctttttttgtttttcttttttttaagctccacaaggctactgcacattgcgttcttgctctttgtgatccaacaagagggagtcagttttgatttgggagaaaggaggaagaaagctgtttgatgggcgagaggaggcatgtattgattgcattcccgttttgctttctggggctggctggtcatgtcactcttcatagctgcctggctctagtggtagaagagagtctaatgagagacgctacggctgtgtgcagcttgcacacagcaactcttcagctccaaggaatcagagtgagctcctgagctccctgggattcagaggtgcctcagccccaaatctttttcccctgcatttaggctagaacaggaaagatgctactgggagagaagagaattcctgacatcttgcctttcttgtctgctttctgcttgggtctgtggagcagccacctctgggcagaggtgcaggaagtgtgacagaacaggaaagctttaaagtcactgtctccctccctcccatgccctaggctacccttgctggtcagaacctcctgcttactctggtggacagacacctgagttgctgctcttgatgaagtttctcccacttcttcaaaccagcaaggcataggaccccacttggcttggaagacacgtgacgctcttgatcatttcagtcccttttacatccccataatatcaccgtggcctgttagattgatttgtgagtaagattccttgcaaatagcaagatgatcggaagcctctatcttttccgggggaggtgcatatttaaacagacagcctaagctatttatagattgtaatgtattgtgttacagggaaaaggtggaagtcaacagtaatgttctgttccccatttcctatagtttcaagcatattttcttgctagtcctagagactttaaacatttagaatctccagtgatatctatattcttttgatgtactttgtgtagaaactcaagcacgagcaggcttcagagtcagctaaccaaagaatcttggggcttttgatcactttccattagcacaaacagtgatctctgccctgttgtatattgtttgaaaggacatttgctgtttaatgaagataaacatgttgctgggtttttaatatgtcttctcaactcaggagctgaaaaatgcatacatgagattagttctgttggcgtagaagggattctgcgtgccccaaacattttcctagccgttggctgaacttttgaaatgtgctttgcactgcaagaacagatactgaacagatattttacttagaaagccttctgtttcaatggtgattcccaggggccactcaaccacatcttactaaataatatttggtcaaaagagaaacgtgagtgcaagaaggacacatgatcacagccactaacaaattcctagaaagtgctgcttgttgtcatttctggttaggaggtgatggtgatggcaggtagagggtctaagccattctcctgtctctcttttaaagtacattcttctgttgctgtagctcctggcattggctgtcaccctcacttgcaggagggagggaatgactgtttgttgctgttggtgtctgaaaatctgtgggcagaacttttagaaaaagcagaccacagagcctgctatatattttgttcagcccattctatttctcttcactttttaaccgattgcgacaaaaaaaggggcctgccttctaaacttgtctttatctttaaaagagaataccttttataaatgcttagaacttggagatgctgttgtttttatttagtatttgaaaagctaagtatgctgacactgtcctgggagtgcaggcccctcattgagagagaacagtaaacacagcaatgactttgcttttaatttgaaatgcgttactcttcttagagctgaggggtgatttgagatgttcctgttttcacattcagctatttcctggttctgtgatcataataaattccatagctccaaaacattagagcaaattgtgtcttctgtaggagttatttacggatactcaaacaaatggtgctttctgaggaagaagaactgtgtatgaaaactatgtggtaaagcctttcatatctgccgtggtggcagaacttctgaggagctggctttgagggtaatgatatctttatcaccctgacgctgaatggaggcggggaggcctttgtgtgttctgttgccaactaacacctggctgcctcagggcatcctgcctggtaattgaacccatgagtatgtacaaagattagagggaccgtttgaggagaaagatgggggctggagaggcaaggttagtcttgccattataagcttaggtgcagaaggaagccaagctacctggaaggccacctcgtggcaaagacacccactaaggcagggcggtggcctgggactgaccatcaatcacttcccgctcattctcctcagaactgaggactgttgtcttcagtcttccccagcctcgcttatcttcctcctgcttcctgaaggaaatatccttttgcaatgggtggactatcaacttgaatttttagcaagcaggctggagaagtttttggaagttttggagacatggctggtcttgaattcctgggctcaagcaatcctctcactttggcttcccaaagtgctaggattacaggtatgagaagtttttggaggtttcggacttgttgctaggttgattctgagggagaaaagacctctgttattcagaaggttgtggacttctgaagaatggaaatcgggcaccctgaaggaaacatatgtcaatcctagtcctggagctagcatggctcaagtttattcccttaaatgtctattgtgttaaaacataaaaagagtttagatatacttccacatctttgcagttgttagctctctggacatttataaagggaaaggaagagtgaagcagagccccattaattcccatgcatggtgtctgctgtttgaatcctggaaatcaggatgattttattcacatgttaatgccctctagtggctagtgaggtgccctctaagcaggactttccccagcttccaccccttcctctccctaactaaattaagcacccactttacagtagttgagtatgtgtcatatcaagtctgtattttcttactaagattcatctaccacgtgggaaaaaaaaaatcaaaagctttgttacagttcaaagaacgtagtgctgttgctacatcaagtgaggataaatcttccatctgtagcaatctgtattataagtctactggatgtgacagaaaactctttaaaactttgatgcacatattttcacagccaaccgatttcattaaagtgggagaagtgtactattggcaagcagtttttctgctgacttcccacccttaaatagacaagctttataaaaagacaaaatcttcccagatctatttggttggccaaggtgacatttgtcttcctccctcagaaggttggtaaaattaaccttctgctttctgtatacctttactgtatttttatttctatttatttatttatttatgagacagggcctcactctgtcacccaggctggagtgcagtggtgcactcacagctcattgcagcctcaacctcctggggttcaagcagtcctcccaccttagcctcccaagtagcttgggactacaggtgtgtgccaccatgcccagctaatttttgtatttttggtagagatggggtttcactgtgctcctctggttggtcttgaactcctggactcaagtgattctcccacctctgcctcccacagtgctaggtataagccactgtgcctggccctagttttatataggtaaagcattagtcactcacaatgatctttgaatgagttatgtaagttatgtttggtttctcctactttgttttcctagtcagttcaaccagtcaagtatgagatgagtggctgctgtgagcttgatcaagtgggtcggaatcccctgggaatattgttaaaatgcaggttctgatcctgtcggtctgagatagggcctgagatgctgctggtcccaggaagacactttgaggaacaagttgctaggtgatgcagaagacagaagccatatttgattttcaaaaatcctatgatctgaaaaggaactaggagaagtatacaaataagtatggcataagacagaaggtgataaactgtatataaaagtaaaaacacgcttcagagggttaaagatagaagtgatcacttctgattgggaagatcaggccaatttccacagagaaggtgatttgggaatgggattttagtttgcaacagggattgcggggaggcgtgcgagggccattgagaccagagacgcagattctggaaagtgaagagtacgttctggaacaaggggccacccgtatgcctgtgatggggaaaagtgggagataacagttgggaaggtaagtggaagccatattgtagactgtcagacagtctgggatggaaactctggacttaattcaggaagcgaagaggaaccagcaacaagagattttgaaacgagaaagaagattgaaactgcagtttagaaagattcatctggcatgtatatgtaggatagacgggagtggggagtgacagcccattccaagagaaggagtagtagataggacagatagcatgattactcttagcaatggggaaaatagagactagatgcgatacagagagagaaggatcagaaggtgtccaggggctgtcagagtttcagtcctgaatggctacagaattaccataaataggacagtcagaatgagctatcgaatgcttttgaatggaaaaatgacctgaatgagtgcacaaatgtcacctccaagaggccttccttgtccatcctatctaacatagtatgccggtcttcttaccctgctttgctattttcatgacactttttactgtgacattaaaaggatggcaagaaaaacagggaggccaggtaagaaacctgtagttgacaggatagaaaatgacagtggcttgggcttgaatggtggcagtggcatcagagagaggtagctgggttcaagatacagcctgatagtatccagtatattctcgttgtgcatccagtctcagctgtttgtgtcttgcaaaactctgtacccattagacaataaattcccccttcccccttccccctccctcctggtaatcaccattctactttctgcctctatgaatttgactgctctagggacctcctatgagtagaatcacacagggtttgtccttttgtgactttttgtttagcataatgtcctcaaggtcatccatgttgtaacatgtgtcagaatttctttttttaaggctgatgaatattccactcttgtatatatcacattttgtttattcattcatctgtccataaacacttgggttgtttccaccttttggttactgtgaataatgctgctatgaatgtgggtgtacaaatttgaggttctcctttcagttcttttgggtatatacctggaaatggaattgctggatcacgtggcaattctatttttaaattttttatgaactgctgtatcgttttccacagtggctgcaccactttgcatttctaccaacagtgcacaagggttccagtttctctatgtcctcaccaacagttgttattttctggttaaaaaaatgtatttgatagtagccatcctaataggttggaggtttgagacctttttttaggggatatttcagatagacagttgagtcttcaggcctgcagctcaagaagtctgggcctgcattataccatagaagttcatatttatgccatcctttatcctttcaatgaattttttggccagtttgtctataagcatttaaggatttagagatttctattaaaccatcagatttgtgcttaaattatttaatctcaaagacattttaaataatatatacattaatttagacatactgctttcttccactttcatattatatgaaataattttacttacaacttttatctactatatcagtatcttcctcacgttttgaactacatggcaggtcatgtagtatcgttttccaaagcacatcatcttgacgttcatctactctgtgtttgatgctattaccagaaatttcatcctaagccgcaagtgcccattcctatattcgttggttacatttgttgagaccccattggccaaaaaaagacatatagccaagcccacagttaatgtgagcatggctatagggaggcatcctacattggggaccattattgtcacaatatcctaaaccatattattaagagatgtttttcttcattcttcctgtgagtgtattttgatgaactctgcaacttaaccacttactgtgttgcttttaaaagtaatctttaaaatgcttttttatttatagtgacatccagtgcttgcaactaggaaagtcatacttccaagaataattactagtcaaatttgttttcttccattaaaaaacaaaaggaaaaacagttctgttaggtggctgttatataaacatgccaaactagcatttatcaaggtagttttaaggtaatatgtcttccataaagactactttatttaagagaccaatagatacaataaactttgtaagaactcaaaaattaagggtacttaggcttttctgagggctttctttggagaaaaattaccttatattatattaccttttattcaggcatacataataattgtaaatttggctttggagacttcagtcaaagaaagagcttctatacaggaaaagcccttaaacactaatatagtgattgagcccattgctcataaatgtttgctaagaaaaatacttgtctggcgtattcaaaggtcagtctttcctagaggcatgaggaacgtttcagagttccttcggacattgcagtgctgtggctggatgatgccacttacccatctatttatccatttatttattcattaacttcaaacaccttctatagtgcagagaatttctaaataccatatattagaaaatctttattttatgagtttggctgacaagggtaggaataacaacagatattaaaccaaaaagttttgcattactgaaaaaattggacaaattcatattaaaagttcctaaccaaaaatctcacagatatgatgcagtaattgaaatccatcatattctaaggcttaaagcatgatgatctgcttctacagtgataatttgggtaagaaggacagtgttctaaaaaagcagccttaatatataacacggaggagtatatgtattttggtcaccggccatttgtctgtccatccatccatctgtccattcatccatccagctgtacatacatccctacatcctttggtttatttcagtggtgtcaactcattacatggcgttgaatgatgttatcaataatcattggcatgccctttactcccttagggtagaagagaattaggtaaaaggtagtactgaaaaaatgttttcccctcttgctgcaaagttataagcttttgtttcctaatcaggcccactagaccacattttgccagtgagcctccactgaaacaaataatgataatgttcatttcacatctttgacctgggaattgcagagtgatttaccaacattaactcatcaattctcctaacacttctgaacaagacattataatatatcattgaattcatcatgtaaatggattctgtgttttccagagaatttcaatatcctggccaccaattacatagggagtgaggagaaaaattaaaacaaaaattacccttttctgaactactgtcttgtggcctgatctccatcagaatgtcttattttctggaaattttaaaagggggaggtcagaggagacatcagctttgcttatgtaaaactattaaataaaatcatactagagaaaaatcattagaaaatgaccatttcccttaaaccactttcttcatttgactcattgcttaataaaatgatgaacttgaaacgatgctgcctgctccatgtcacccaaatgatgagtcacatcatgtgaacaaatggaaataaatcaccagcgaaaaggccaaacttctgtgctaccctagaaatattttctatttttccagggcttccaatgatcttccattcctgtttaactcagcttatagtaagccctgatgccaagattttctgagttccctgccaaaaccatgatgctctcagcctgggcctctcttctaggagggaagacactgccctccagatgaagtgaaaaggagaatcacaaaaagaggattattccttatgggaggaaatgggacacgtgctgcttattgtaacatcattcgccattcgttgggtatatggaggcttttatgagaaagcagaggtttttataactcatttactctggcaagtgaagcaacactaaaattacttaagtgtttaaaagatagacgcatagtagtttatgttctcagtcatcttattactgagaccctaatttgctttcgttaaactgtcggttctccctgagagtgctattgttatcggagcctcataaccgtgtacacgggtcagtgatggtacaatatttccggaaatttaagtcctccataagtagtcaattgcaggttgttttaaggaacaaagactgcttttccagcaagcctggcttgtgttcctattaaggccccttcttttttattgcaaggggaaatttcaaaatctcattgctgtatttaactttctattttagtaggctgccagtgcacttaaccttccatataaagcttatatgcgtttatgcgttctttcccttattaactttttaaggtttgggatgtcagcctgacctaatgatagaatatgcaaaaatagtcctgataccagcaccctgagcccacctaataagggacctttttcatactgtttacttatttctgagtaacagaaagtctgatggtttggtgctggctggttaaattcaacacatggtaagcttgcctgttagtgaagaaggttgagatttgggctgccggtatgttttcttctttcaggcaaggactgagtggcttccccatgtgtgcctaggtgtccagctgaccacagctgagagggataagcagggattgtgtccagctgagtttgggcccctcactcagtggcctacgttcctcggagggtgtgtgtaattagctgctgagtagtagaaggcagtagccatgatcccagttggaaaatagaagtagagctaaagctaaaaaaaaaaaaaaaaaggaaacaggagagctgattgcaggaggaggaggaggtgggctcttgctattttctagagcctgaaccaaccatgcaaagtagaatagcaggtgttgcagctctttcccccaggaggactcctgagcctcgtaagaaggtcagagagctggttgaatgttggtgcaggaagcacgtcaggaacagcttaacactggtttaattttcatttcccctgtgttattttacacatgaggggagtctgaggctgagcgccgtggagaggtctttgtggggagcagttcacgtcagatccaggcctggtcacctcctggcctcatcccattcacctgagtgacttgtcacccttttcaagtccttttccttctttgctttttgcttctccaagtgtgagattggcaatgtgatcattatatgaaaaacatttaaaattaaaaacgattctgtgcaaatatgaaatagataccagttttctttgatttctgtagtgtcactgatgataatatgcactgtagattaaatgattagtttctgggggtgggggtgctaccactcttttatgtaccaatcatatataaaataagtcctgagttcagaaatgttaaaatgacaaaaatcacatggttgtcatatataagctatgtgtgttgtatacaggctgtttgacacacaggccctgttctttacaaggcatgctttctggaagcccaaaccagtcccaggagtgaaagctggctcctagcaatacatgcgagtaggagtcagtgagggcttaggaaaattatccaggaaattcattttgagcagcccaaactgctagctagtagctaagctagtaggcaggagtttcattgaccacatgtctcaaccacatttaccacatttcttgctaaagatgccctaagtggggctgaaaggcacaagatatatagcaggtgggggcaagggggaagtgaagaacctgggtaccccacaccctagatcattcaattacatttttaagaattttttaaatgtacgtatgttaaaaagtttcagttttgcaaaatgaagagtttggggggtggatggtggtaatggttgtgcatcattgtgaacgtacttaatgccactgactgtatagttaaaaatgtttaagatggtacattttatatttgtgtagtttaccacaatttttagaagtatatatgtaatatatatgtatatttacataaatatttttccctagtttgatgaaagtatattgtcatgtcatccactcacccatccatctttattcattcattcaacaaatatttatgaagccactgttaggtcaacatctgtgttccaagctggaatataactatgaatacattttctgtgcttgtgttactctgaggttagtttaagtgaaagccatatgaacaataattaccagccagcgtggtgagccaaaaatgaatgtgtatgtggagttaagactgtgtccagctgtgcagagttgtggggtgtcttggcatctgtcaaagagaagatggacataaagagatcacctgccaagggacagcatggacaaagcacagggaacaaacagcatggtgcagtgtgtgcagggaacagtcagtactccattggtggtaacttgtcatgaggccaggagcaaaccatagagggtctcataggccatgttaaggagtacagactcctcagctcggtggaggtcagaccacattctccagtagcctgaggatttctcagtctcccaacctctgccctgtgaacctctgtggggctgccttcagaagtacttggtggtgatggatgaggagtaggaggaaccgataaaactagatagtgtaagtagcctcaattttatttatcttgtgtattagatttctatataagattttgtttgaaggcagagttctggcttttaaaaaacacatttgaaaatcattgctgttggcaatgaggaatcataaaaaattattatagttggtgacgattagcttagtgttttaaaaatcaatattctgcattcaaagcaataaaccttctttctccatttctgaacctcacctcacagtactttgcacatactaagcattcaatgaaatgttcagtgggaattgttttagggctatgacttagggatattttcattatactactgtcataagggtccacttaaatagaatgttgcccagtaactcaaaaggaatttgtagaaatataaactatataacttgccttttattctcacttttctttgtgtgcgattggactgtaataattattttttctgagttttcttgtctatttctgagacatcaggttttataatttgatgctttggacctggttgacaattccgattctgtatgtaggattgaactttgtgggaaatagcagttaattgtattttttaatgcttaaaatgatattctgggcaagttttgtttctttacggtctatagccagaatcctactgtttttcaatttgtttaaatgcaacagcttatacagcatatgtacatgttcagttgaagataaaggatatcattatttttagcctattacaaagaaaaccacattttctcttaaatgtcttgatataaagtaatttgaacacaatttctgcacaaatcattttcaagagattggctgtcaagtgtatttttttaagtagcactttcataagaaccaatgaaactttgcaaatttagatagattctaagcctgaaatgtggttgaagatgtcagtttttaaacagcactttgagaagtagttaacttaaaagtatagcaattcagagcatactgagaatgattttgaagagtaaagtcttgatacactgaaaagaaagttgacagattcactacaattaggagacaaggaggtacaactcccacttgtgaaaacttttctcatctaaccaacttctaatacttgcctaagaaaatcttcagcaaatccttactcctttgcagctcctaaatctattgtatagaattcttccagtttcctaatagatgctggcgaggctgtggagaaataggaatgcttttatgctgttgggggactgtaaattagttcaaccattgtggaagacagtgtggcgattcctcaaggatctagaaccagaaataccatttgacccagcaatcccgttactggttatatacccaaaggattataaatcattctgttataaagacacatgcacacatatgtttactgcagcagtatttacaatagtaaagactggaaaccaacccaaatgcccatcaatgatagactggataaagaaaatgtggtaaatatacaccatggaatactatgcagccataaaaaagaatgagctcatgtcctttacagggacatggatgaagctggaagcctcattctcagcaaactaacacaggaacagaaaaccaaacaccgcatgttctcactcatagtaggagttgaataatgagaacacatggacacagggaggggaacatcacacaccagggcctatcggtgagtggggggcaaggggagggagagaattaggacaaatacctaatgcatgaggggcttaaaacctagatgatgggttgataggtgcagcaaaccaccatggcacatgtatacctatgtaacaaacctgcatgttctgcacatgtatcccagaacttaaagtaaaatttaaaaatattttaaaaataaagaattcttccagtttccttatggcataataatggaaacagaataataacatgacaaccctcctttccttgttttaaggaaaagtaagttgttaggcctgtgaacaatggcagaactgaaatggagtcttcactcaagccttgtgtgtgattgtgtgtatgcatgtgtgcatgcgtgcatatgtgcacactcacgcacatgcacaaacctacacatttgagtgcaccagtttaaaataagagaaaaaagtgacatgaaactcacttcccaatttctaccatcattaataatacattttaccaattctgatttgttctactattgtgtcaaggctagttaatgtgccccatgcattggcagacaagatgatattatgtggaaattgtgtcttgtctattataagaacctgaatatttaagtatgggagatttttgcctgatattcttcagtcttgtcactcactactgattaagctttgtaatctatatatgggcattagatgaatccataaatgaatgaattggtagtttcctcaatgttttttttttttttttttttttatcataatgaagatatttcatgaccttttaccagtcttatcacatcttggaaagaattactacatctctgaaaaccctacccaggtaccttcttgtagttgggccatatgtttctcaattcagatatacccttgaggtccactttccttaggtggacatacacttatgtacactcacacacccacatgcatacaatatagagaaagaaaggtaaatagtaaccgacagaggtagtgcctgctattctcttcagcgagttgttatcccctcgtcccattccacaagatgggtgccacattgaagatgcaaccaaattacatgcccacactcacagtggttggcccttttgaaattactgggagattataatgatacagactgtggggttgaaacaattgtattaaaatcaattttctgccacttccaagttctgtgatctagggctgtcgcttaattaatctctcagagtttgtttcctcgtgtgtcatatgggaacaataaacttactttcacacggttgttgagaagagtgaatgataactgatacaagaaattcaagttttgttagttttaatcggacatcataagacttttaaaatcatgtaaatgtacatccctaattgcttgcaagtggtgcaaggtgacaagaggagccacctttgtgggaggagtaggtggcaacctctgatgacttcaggacagtgactctccaccttggctgcatagtagaatcacttggggagctttccaaaattctattgcctgagccataccccagaccagttaagtaaggatctctgtgggtggaacccagacattagtactttctaaatctctctgggtggtcacaatgtgtagccaagttggagaactgatgctttagggggatttaaaagtcttcactccttgcattggctgaattgatgatagccagaattctacaacctacactgtattctttttgcttaagataaacagagtcttaggtatcatgccaaaagtctattatttctcttggttatacacgatttggcatgaattagtttattaagttttctccaaagagccaatcttaatgggtgggtgtcgggcttggaaagagaacagaggtctgtggatatctgaagacaggggctgttcactagaggggcacaaacacagaggcaaatgcaacccaaagtcagcaatttcaagctactgttgcttttgaaaattagttcttgcaaaagcaccacctcaagaggtggttggcttccctgaaagctcagcatcatggctctggtgggtcatcattcatgaaaacttgctgcatctttaaaatgtgggatgaggaaaaacatttaaatagtggctgaatacagtcatagtgtaaccaaaagccagaaaattaatttttaaaataatgtatatttttaaagttttgttttttcaagagaaaagactaaaatcacttcatactcaaaatctctcttacctcttttcaacaattggtgctgagacaatggaaaaagtcacctgggacacatgccagagaaagaagttgaacccttacctcacaccatatacaaaaatgaactaaaaatggatcaataccctaaatgtaggaactgaaactataaaacttttaaatgaaaacaggagtaaatcttcatgaccatggatttggcaatagattcttagatgtgacaccaaaagcacaaacaacaaaagaaaaaaatagatgcattggacttcatcagtatcaaagcctttgtgaaccaaagggcactgtcaagaaagtcaaaagacagcccacagaatgggagaaaatatttgcaagtcagtatctcataagggtctagtttctggaatatataaagaactcttacaattcaaagagaaaaagactaacaacccagtttaaagatggacaaaggcattggatagagatttctccaaagaagatatataaatagccaataagcttatgaaaagatgtccaacatcattagtgtttaggggaatgcaaatcaaaaccacaatgagataccactttattatggtcacccattatgatggccataatttttttaaaaaaggaaaataacaagtgttggcaagcttgtggaaaaaatggtaatcttcctacctggctggtgggaatgtagtatggtgcaatcactatagaaaacaatttggcaagtcctcaaatagctaaatacagaattaacatatgactcagtagttctgctcttaggtatacactgaagagatttgcaaacaggtattcaaacaaaaacatgtacatgaatgttcatagcagcatgattcatagtagcccaaatatggaatcatcccaaatgtccatcaactgacgaataaataacaaaatgtggtatagcctacaatagagtattattgaaccaaaacaagaatgaagtactggtacatgttacaatatgaatgagccttgaaaacattatgccaagagaaagcagccagacacaaaaggccacatattgtatgattcagtttatacacaacatccagaatagacaactccttagagtcagaaagtagattagtctttgccaggggctgagaggagtgggggacagggagtgactgtttcatggataagggggatgatgacaatcttctggaattagatagtgatgatggttgttcaacatgtggatggagtaaaagccactgacttacacactttaaaaacagttaaaatgctgaattttgttttatgtgaattttatcttcattaaaaaatacccctttgaccccatctcttctctaatcctgcacatatagccttaaaccagtcattttaccctttgtgattccattttcatcttattctgttttttcctctaatgttcaacttctgcaaagagacatctacactggtcttcatttcctttccagcccttccattcatcactccagattctacacctgacctggaaaggtctgtgttaactcaaacagaagcttgggcacctcttccttactagaagggcattccagtgattgacattagaaatcaagttcccagcatggccctgccaccaggctggactcgtccattgcactgtcaccaaggaatgttaagtcttggaaacagatggaggaacttgcacggcgtttcccagcaggcacaggcgattcctgcaaacttaggagagtgaaagtcacacgaacaagaatgtaaatttgtgtgagaagacgtgatgctgttactagcagagttaaagtgcttttaactttggataatggatagtctgctctgattgcctcgaaggtggatctccaagcccacagaacggtctaaaagtggaaggaagctgtattaatcatttatttaattttctttctttctctctttttctgctggggtcagcaggaatgggaatcttttttttttttctttttacatcagtcttattatgattatgattatactgaaagacctggatgggaggaatgctgcaatctgaattaaaaatagcattttctgtcctcccacacacaacacttgagtgctctgaatgccttttataaatgcagactttctgcctggctagataaaagaagctgtcacttcatttccataacgaagtcattcccgggagaattccattgttttagcaatagaatttttgtaaaaggcctcttattttgcctgaaaaaggtaacaaaaatgaacttttgagagcttattcgacaaaacaattaagcagtgaagagagattttctccttttttgatatattaggagttgtaagtgtgagaatcccctgagccatgatactaggataaacccctaaatctgcaagatgaaggaggaggggagaaatcctgttattctttctcctaatagaaatggggatatgctcttccccgagaatatgtgtcctagagccaagtgacacatagatgatgctaattctaaagagttttaaatatttagtcttaaagagaggtaggaaacttgtagaatgctcatggtgtaaagaaattccttggggtttttaatgaaacgcgatcatcaggtattttaactgagtttcaggactcttaagacaaaccacggctgcatcttgccagcgtcctttactcataaaatagtagttgatatttttctttatttgcattgaaattgcagcaagtggagtacagggtccttcatgatgcagtgtgacctgtagcgagctcagacaggcctgtggacatgtggtcacactcagcacccctctcctgtgtttccccatccctccacacgatggatctgtgctccaaatatggtatcaaatcttcagcgccacattcatagaaagaaagaataattgtatttcttgttacttacccggccctgcgtaacccacatcaaagtatacctgtctttggtgtttcaacaggtaatccctagatataatgccaagtggcatttctgctacatggtattcacagttaagaccattgaaatcccagttttaagctagaatgcttttatgaagcctcctccaaaaaaagagaagttttcaatagcacctttgtcttgcaatactttgttctgattgagtcagaaaattgtaatatttaaacaaggaggcagttactcggaatagtattaaaaaaggagtttaaagtatggagttgttgtatctgttggcttttaatttagtaaaacaagtagaccaaaaagaaaatgagtgctgttgacgtaatattattatggaaagttctgtgggggcaaacattatgcaaaagtagttaaatctggcactgattttgaatttcagaaaataattctgttgtttttgagctttgaatggcttttactaatataccaataataactttttttttttttttgagagagagagagagagtctcactctgtcacccaggctagagtgcagtggcatgatctcggctcactgcaacctccgcttcctgggttcaagtgattctcctgcctcagcctcgtgagtagctgggactacaggcgcctgccaccatacctggctcatttttgtatttttagtagagacagggtttcaccatgttggccaggctggtcttgaactcctgacctcaaatgatccacctgccttggcctcccaaagtacagggattataggcgtaagccaccacgcctagccccaatactaattttttaaagcatgatttgatgtcccagctgtagccatgcaattttgcatggtagtagttcataaaaagaaaaggaagttgtggctttgataggatgcttccaaggtcgtgtttttaatacttttggtaaattctgttacttgtgtctgttcaaaaggacagaggttgggagatgcatatgtggattctgtctcttcattttatcttcactccccgtttggtactttgtgaagtcaggccaaataaaatagttgaagatactatcatataactctcaatattatggcaaaaagagaatgagaggaaaatatttagctatttcttttttaggatttttactaattgtgttattaaaaaggagcaaatagagcaggaactgaaacagacttaaagtcagaggactggactgcacacattagcatcttgcagaccttagctgctcatgatttataaatgcttcagaaattatcaaagcatgaggcacaggctgtgtttcagccttccccattttcaccaagcacttctgcaacacctaaacactgaccttttcaagcaggcatgaataaaactctcctctgggcagaaggtgcgtgatgactcatggcaaccagaaaggggatgtgtaactcgggatgtggagtctctgggcttctagacccagacctccctgtcttctggcccactgttctttctgttgtgctacagcaatacctgaaggacctgcgtgttgaacaaataaggccaggaataagttgtcaataggagcacatgacatcttgtctttaaaatactaatttcctgagacgtcgttctacagctgctcagcacagattgggtatttatcatctatatgttcaacttacattttattttcattttattcttgatatgcagacatacttttctccaatgtataattatatttcatagcaaactttgcactacgtccataaggagatgtaacctgcatacaaatacacacagcagcagtctctgtatgaataaatccttacctttatgtgataagccatgctaatgataagaagcagtgacatggatcaacatgaaatataatttttttaaaaaacctttgaggatagacatttttccagcatatttatctctgataatgtgttctttaggccggtactaattttggattttattccttgaacacaaaccagttaatatacacagagaatattctgagtgcatgctaggtatccaaggactgccagtttgtaagaaattttacaatggataactcccataaatgatcaaatgttgactgaacagggaacgcatgatattgtgaataaatcatattcttcagaataccttgagttttggcctacctcccacgctgacctccctccaactcttcttgaggtctaactggactctcagtccagccctgcactggagatgcctctcagtccagccctgcactggagatgcctctcagtccagccctgcactggagatgcctctccatgggaaaggggtgtttttggcccagtttgcctgccacttaagctccttggtgggcagggtggagacagggctctgcaccctgctgggctgagtgtgctcattcagaggaagcatttctgaactctgcaattgccagcagccctggcagcttctctttattcctcagaaaggaaatacaaagagttacctttagttctgagttggaaaaagaggctgttgtggaacatttcattgagggactgcacagtttccttagagacttatgtgatgatttttctccaagtcacccaaaagggtgttcttccatttgaacacctgtcctcttccatggaggacagagactcaaagacatataacgtcttcaagtataatgtaatataataccatgttatcaatcagttaatcaacaaatattgatcaaagagttatcatttgcgaaagccccgtgaagcttacaaaaagaagacagacataaaccctacctttacggaagttaccacattccacttggggagatgacacctattgtaggataaggaataaaatggttagtaacataaggaaaatgaattttaaaaccataggcattcacatgcaaaaacaaaacaaccaaaaaaaaaaaaaaaaaaacttctgattgagaaagttgtagaataagaggataaaagagttgtagaaaaagtgggatttgagctggtcttgggaggtctggcttacattttgacacgtggagtagaaatgcgggctctcagagaggaagtgagaagctcactgtggctgcttcagtgtgcatgaggggagaagtagaaatgaagttggaaaagcatgctggggccagattgtgaagatcttcagcatcaaataaagaatttcgaagatgttcagtaagctgtaggaaccaatgaaggtatggatggcacggggaagttgtgttatatctactttaggaagttcgatccaacagggatgactcaaatggtttagagagagaaagcattgacaagaagaccaatgagcaggctgctgtgagaggaattcagtctgagctagcatggggcggtgaagatagaaagggtgcagaattggtaggacttggaaaccgatggaatgtgggagaaagagtagaagatgatgatgctgtcagcttccatcagaaattaaagaggaggagctgggtttggagcaagggactgggaaagtttgaaataaacataatttgtttccactgcatatatccaggagtttgtagggggagataccagggaccaggatacagatttaagaacgataaacagtagaaggaaatcattatagaaagtgaatagaactgagcagatagccttaggaaatctgtcccctagagttagaaagaacagagagagcaaaaaactgcagaggggccataaggagtaatataaggaacccaagaaagtaccatctcagagaaattaagaatatttgtttattttggttacaatagacaaattaaactcaaagtgattcaagcaaaaaaaaaaagaaatgtattgtattatatgtggattggttttctattgctgtatgacaaactacaaatatagtgacttaaacaacacctatttatttttttttgtgtgtgcatcttttctttttttattttttatgttattattattatactttaggttttagggtacatgtgcacaatgtgcaggttagttacatatgtatacatgtgccatgctggtgtgctgcacccattaactcgtcatctagcattaggtatatctcctaatgctatccctccccgctccccccaccccactacagtccccagagtgtgatgttccccttcctgtgtccatgtgttctcattgttcaattcccacctataacaatacctatttattatctcacagtttctggaggtgcgaagtccaggcatggcttagttgaattatctgttggaggtccgaagtccaggcatggcttagctgaattatctgttcagggtttcataagactgaaattgaggtgtcaacagggctgccttattatctggagctcatggtcctttttcaagctcacatggttttttgtatttagtttcttgtggtcgtaggaccaaggtcccgttccattgctggctgtgagctgggggccactctcaggtcctggcattcaccttcagttccttgccatatgacttgcctcctccatcaacatgtcctctctcactttgaatctcattcctggtaaagccccatcccttttagggttctcttaattagatcaggctcaccaagataatctctctattttaaggttggttgactttggacctcacttatatttgcaaaatcccttcacaacagcagaaccttgattactgtcccactgactaactgggaagaggtgtgtgtctggcaggggacatggcaatcttgtgggctacgttagaatttggtctatcataatataactaaaaattccagggatcaggccgggcgccatggctcacacctgtaatcccggcactttgggaggctgaggcaggtggatcacttgaggccaggagttcaagaccagcctgtcttgaacatggccaacatggtgaaaccctgtctctactaaaaataccaaaaattagccgggcgtagtggctggtgcctgcagtcccagctactcaggaggctgagacaggagaattgcttgaacctgggaggcagaggttgcagtgagctgagattgcgccattgcactccagcctgggcaacaagagcgaaaccttgtatcaaaaaaaaaaaaaaaaaaaaaaaataataataataataataattagccaggtgtggtggcatatgcctataatcccagctactcgggaggctgagtcaggagtattgcttgaactcggagtcagaggttgcagtgagtgagaccgtgccactgctctgtctgggtgatggagcaagacttcgtctcaaaaaaaaaaaaaaaaaaaaaaaaatccagggatccgtctaacttctggcatggctaaatccaagggactttactgtcatcaggactcagattttctgtctttcagcttttctctgtactgggaagcttccttctccagtgggctttctgtaagaggtggctaaagaaaccagctgttagtagcatcatgctcccgtggtctcactaggaaagagtgtgttgctcctcttagttccaggtagtctgagagaggcctttgattggcttgccttgggtacatgcctacccctaggccagtcactgtggctggagggttgttgtattacgattgcccagacctgggtcatatgtccatcttccaggccaatgtgtgaagtcatcccagcccagataacagccaaggggagagatcattccagaaaagatgctgttcaggcaaaaatgctagtctactaaataaaaggaaaagaaaatggaaggaactattactagtgaactgtatcagacattgttagagaagttaagaggaggactcagcaaaggtcactgcatttagaaggcaggaaaccattcttgacctttggaggagaaggaaggttactaacacagagaaaagtggtggaaatcaagctccagagttttaagatgtaggcggtgaaatactggcattgaatgtatagtacaactgtttgttggtaaacagaagagagaggacagccatttgggactgtattagggtatggataaattcttttaggaatagcagtgactgagtatgcttggagtgtgagaaatttccagtagagaggaaaaagactgaagggaagttgggagcagagttgaccccagcaggatctggaaccagtaggaggagaatggattcagactccaagtagagaggccacacacagtgtaataacctgggtaatatagtgtgtgaagttttttgttgtttggtttttggtttttttttttttttttggtcatttgtcgcttctttgaaatagacaggtatcattgctttcaatgtagctatcaaatggtgattaaatgtactcaaaagatcctcagcatctctctggccctgtaattgacagaaacatttaaccttagagaagtggttctcaaagtctggtccctggaccagcagtatcagcatcacctgggaacttgtcagaaatacaaattatctgaccccaccccaagcctactgaatcagaaattctacagatgggtcttagcattctctgatttaacaagaccctctagccatttctattcgtttctttcctttttttgagtcggagtcttgttctttcgcccaggctggggtacagtggcgtgatcatagtgcattgcagccttgaactcctgagctcaagccaccttcctgcctcagcctcccaaagtgctgggattacaggtgtgagccactgcacctggccttctccagccatttctgatgctgcttcaagtttgaatatcactgcctcagaggtctgcatctcccctccacatgccatgaaggtttccttaatagtggctttgagaagctatgagagctagtgatgtaagctgctggtgatgaggaaatgggggagtttgtaaatcttgaaaggagatgacaactgttcaaattccactaatgacttaagatgtaatggattggaagaacagaatagaaaggctaagttgtaatttaattttttttgagtttgtggagggctgacacatgatgatgataggcatcatcagactttcaagtccctggaagacagagaaaggtgaaatgggcttaaagcatagctgtagactggtgattcttttggagtaagggttaagtcctagaacaggttttggatatggatcatttaagttaaatccaggctcttccactagatgctgttaggaggttgcaaaagaagggcatggcaaggtttctttcatcagagagcttagaaactttttgagccttcaagacttaaataaatccagtggagtataaaaagacagtataacaaagtgctgaactgaaaaggaccttgggtcagaatgtgtggtagagactgtaagtgctgtgggcagtcaggggaaggagaaattggcattgtgtcattttctcctctaggcagaggatgaaactgacagcctggcgtaatttcccaggtccgatggcaagatattggacaccttggcttcaggaagtgctttttcttgttctctctctcctttctgagtgtgtcaaagttgccaggtcaaagtgaaggtttatactctgagactttgaatgtggaatattgttaatatttttgtttgtataagaagcttgtaggataaattacattttatcttggacattttaaatggaaagagactcaaatagaagtttggcatatttgtttcagacaggctttcagacttactccattcatggggagaacatgaatgagcctgttggatgatgctttaatgttgtaggatgaagaaagcaaactactgattttccttagtggaagaattaagttgagccagatgtgggatgatagggaagaagaaaacacttcagatgaacatgacatttccactgcttttaatttctttgcaccttgcttgcggctcatgtgggtaagtaaacagaccactgaaccaagaaccaagagagaaggttgacggaacactgttaacggtgggcataaaagctgtttaagtccaagagagaaatagtaaaaataccgtaatcatcaaggggaagccagaaatctggtacctgatccaaggtcctaaagatgtttttcagaagtctacaagtaatgtgatctgttttcagtcctttttgggggagggttttcttaacttcagctgtggcatgcaggtgtcaacaagagagcttccttttacttcactgtgataacggagtgacttggggtgcattagagagcagggtcattatttgctgtcacatcaagaataatacctgcatcaggggtgttcctctcaccgaaattaatcacagagaaggtgtgtgttgctctgatggcctagcagtcagaaagatgaatcatctcttatttcaaggtatggagaacagttgtgtcactcatttctttttcaaggagactcagttgaaatggcaaaataaaaaagagagaaataacagaacacagttgtacatcactagatcagttcgtataatacagactgtttcctctacctggaaacctgatgcctggctaacttctgctcatttttgactttcctgttcgaatgttagttttgtaagagaagccttcctgagaccctccttctaagtgaggtacccccatcatgactacaaatcacaatgttcatttttccttcatattgcctatccagttttcaaattttatgcatctcctaaaactcatataattatttaattctgtccctcttgaggcagtgagctccttgggtgcagggtcctgggctattttgtttaccatgtattccccagttgaacacagagcctggtggatttagcaagtaccaagtaaaattgtatcaagcgaatgatttaattaatgagaaagcacttggtaaactgtattcattatgaaagtgatggttaattatgtgagtagcagacacctcctttctctcttctgtcccaattttgtctctccattttttattagttctttattttgagatatacttgtcagtgtgttaccaattccaaatctaagatttgttattattcattcttgcctttttttagagataaaggaccactcttttttgttttttttcctcagaaatgctattaatgacacccacaatgctaatactacaactgttttttctgtgcatgctcatgatttgaaaggaaaaacatgactggcctttgtcgatgatgtatttgggaagcaacaagattctagtgtagcacttaaattctgtttcttgtcatcctcaaagctgctaatacaagttcctttgcctcaagtgtgcttctcaaaagtatacaaggcgaaataagttgatagtatcgttccaggagaagctgttcctgggtcagccttgaaagggggaaaaaaatcaagaaatccaggtgtggaaaatattaatgatcaggatatgaataagtcttttcattaaaagcaacagcaaataaacaaaaagttatccaatccttttccagcagggcctcgctgtgccactctggtgggtgtaagtgttgtcttcggtgggcggaaatggcagacagccaagtggaaaatttcacagtgtcgcaaacattcagtgcacgaaacgctgcaaaccagcaatctgagggagccgtgtaccaaataaccacgctcctgcatgtgccctactgcccaccttacactctttctcctagcttcctgcgtgatgccttcactttctttttcccggagattccagattcttcgtttctgttcctattctttcctgaaactcagcacagtagggcatgcagacgtttggatgctcccgggatagttgatgattggtgccttaccagtgctggcttttgtattctggctccagagctcaggaacaggcttatgaccaccaacaacgctttgcattaacatagtggatttcttctcgggaactgtgtgtgctttgcaagaatgatcttcttgatcttctccatgacccagtaagatatgacagtggcagaaggtgctagtccttgcctccttttgcagaagagtaaagccaagtggcctgttttgaggcttttgcaagtttgcatctcagctaagattgtgtctgaagtctcccagaaatggcttcaactttggggtgaggagaggctggctgtaccatgttgtgttctttttgggaaaagagcaagaacattgaacttcttttttaagaaaatggtctttggtgaactatcaattcgtctaattggtcgtgagactgtatttgttcagataacaagtgatttgatgatgtgtttacctttttctttttcttctgttctatttccatgctaggtatttctcacttctctgtgaaaggaagaaagaacacgcctgagcccaagagccctcaggagccctccagagcctgtgggaagtctccatggtgaagtataggctgaggctacctgtgaacagtacgcagtgaatgttgtaagttaacaaccaagaacaatatgtgtagtggcttgccttgtaggattcatgaatcacttgatgtaaccgagccaggtgttgaaggggtattagcatgagctctaggtgatcgtccaattaatttctttttttaattggaagggaatttaattttttaagggaagaggtcctgtttgtatttgctggaacttgcctttctctcggcttctatggcatgctgcaaactatctacttcaggaataaaaggatggaatacagtgattctttcattgtaggaacaccttttctactggtacagtcaaatagtatcagatttagagcagcccctttaaactgggctgttgcagttcttttaggttggtgagtagggggtaaaattctccaggctaaggattagcaatcagagtttccatccagcaattattcttctgtatgtgcagttgatgaaaatgacatttttctctctggcttgtaaaatcttgaggtatgcaagttacaagcagttatgtttggtgcttcccttacttaaaatgagctgatttactggttttgatcagttactggcttgggattttgagattagtaaagtttgttcccacatgtcacctgatggccgccttgcatgagaagttttagtgtcaggtaatggaagagatgacatagtgtgacttcagggagcccttccactaggaaataatgcaaaggtgctcagccctcctactttctagagaatttaccttgttgctggactgtgtcacaaaacacagttaggagattttgaccaggaaagaaaatagctacatgaaacccaggatggcctatgaatacctctgaggacgagaagatattatcttcaaattttaggaaatgacaagccaatttcttctaggtttttgttgttgtttttgtgtatatataaatacatatatttctgtaatatatatgtatactcttgtttatgtatgtgtgtgcgtgtacacacacacacacacacacacacacacacacacacacacacacatatatatttaggtttccagcttcttaactcagccagaaaacttttttgaacatgtattacctattttttttgcagttgcctacaagatttgtaaagagcaaagtgtagcatatatcagggagaaaagtattgacaaggaaaaaaaatgttcctaatttttttggtttcatagatttctaaacatttgtattaaaatatgcatatgtatccatatcatctcctcagggttaaataatcagtaatattaatatgagcttattaaattcaaattttcccagtgcttcattgaaagcagacagtgggagacactgaagcttcattgtgtttccattctgtacacgttgggtctagtggaaatcagtcagcctggaatcagctgacctgaatcctattcctactgttgagatcaagtacactggcaaccttgggcaagtcgcgagcccccataaaacaatattttgcaagtctgtgtattgcttcatactaccttattttcatttttttctttttaattgaggtggtgccttactctgtcacccaggctggagtgcaatggcaagatctcgattcactgcaacctctgcctcccaagctcaagtgaccctcccacctcagccttcagagtagctgggaccacaggtgcacaccaccatgcctggctaattttttgtatttttggtagagacagagtttcaccatgttgctcaggctggtcttgaactactgagctcaagtgatcctcccgcctctgcttcccaaaatgttttgattacaggcatgagccaccatccccagcccatactacctttttattaagcaatcagcatcttggtttagggtcctcataaggggaagagcattgtgaaagcactattttacttatttttttaaaaaaaaccttattgtaaaagtttctgtcactatcaaggaataattgtgggccatgttagatttgggtactccagttacagtgtgttttactagaaatcattttcccaatcaggtaactgttagaatgcacttctggtggtattttttaaagcatttttatcctaggaaacaagtgtcttatgtaaaactgctttaggtttcaggctctatttaaataactcatgcagttaccataatcaagatagcttttgtttcaaatctagtgggggttttttgttgttgttttaaccgttgctttgaactgttcatgtgacaccctgtcagacctcaaagattgagtgaggttttcaaaggacttctgaagtgtacactttaagatgccacatggcagacttgaagtaattttaaaatccttctgtaaatggagtgtgttgagagagcaaggaaataccaaattctagtgaactctttgtgcatgctaagtactttcttttcaaaaccgcatttgcttggtaggggcagtggggggttcctagttttcttagtaaactgtgatgttggtaacctttcattatctgggcacatgtttacaacactggttttctgtcttcctgggtttagtgtcctgcatgccccaaagcctgtgccatggagaactgttgcagtagagaaggcaggcaattttcaaagaatgcatgtttgcacataaacagggtctaggagtgggtgtataaatgtgtgagtgataatcacagcagccattggaagtagtggttcccatgctcagcagtccttgcagatgttactcctggcattcattcctgtgcatgtcccattaactgcctctcaaatctgccaccacttgccagcagatggcctttgcccctgaagatgtttcagactggctgtaagggctggggggaggggggatcttgtacaagaagagaatgatgctgacactgaactcagagttagcagacctggattttatgcacaatgctgttgttagccatataaccttgggtcctctctaccatggggactcattttatgatggacaacttgagaaaattgagttaaatcacctccagtggtggtttttaccctaagtgtctcaagttgcataaagtatcagccttagatgaggccaattgaacgtttattttaccttcttgggttcctaaaaatcaatgatttggcactacctcatttacaactgtttttaaaacattgagcacagtcttagggttaaaagaaaaaaagagttattacatctttcactaccatgaaaccctttccacaagaccctcctgggcaccatatgacaattcaaaggtatttatttgagactgtccttagactatagctttagctgtttaaatttagggtccacactcattggtccttttgaaaataaacaggaacgatttttgaacttgagttttctaaaaccacctctgtgctcaaatattggttagagtctaagcaaggagaaagtgatccatatttcattcctaagcttctctgcttccttaagtaggaattcttgagttaccttatcaaagcagccttccctgatctacataaaatagcatccaccccatccctctcagtcctctagccttctgtgtttttcttttaagcaccttacatattatatatttatttgttaatcatcagtctcctcaactagtctgcaagctctgcaaaaggagggatggtattcttatccttattctcattcttattcttccctggtgaatgaatagtacctaaaatactgcttgttcccataatgggcagtcagtaaatattcattgagtgaatgcctaaatgacattcactaagtgaatgcctctcatgtgtgggcctgagccattaggaaaaggaacatacatgctgttctgatgagaatgcttgaatctgatagcagtttaagggtgtggggaagggatggagagtctagactattttccttagaagtggatacttgatgtgtataaagaaatgtgaggagggaacaatttgtgtaaaaaaaaaaaaattctagacctatcagtagagtttggggattttctaatactttttttaaaagtctgcactgtctgtatttcctctccttttccatttgagtggtttgctttgtcacttgtttgtgagcatcctgccctggctttctgtgaacggcggtggttttgtctcttatcatcacatcatttcatcactgcttacgttcatatttcttttcaaagtagggatgggcctgaagtgctgtatctccctagaaaggggctgactgaataacacttcattctagtgcacaccttagaatgaaaaaatggtgtgctggtacaaatgaaacccatttaatgtctctgtggtgtgtgatgggaagttcacaaaagctttcttagggaggcattgtgctagttagcttttgaggacagcaataataaaggtttctggaattttgtgtgtctatggactcccttttcagaataactgctctgagtgcaggcattactttattcctaggaagaaatggagagactaaaataaatacctctgtacctgtgtaaacagcattatgctgtctgtgtaagtcttaaaaaatgggagctgaatttctcttactctgaatctccagactaagagaattgcacacacacgcacactctaataagagcaatctgggaatttccctctgtgtctgtcagtttgtaccttttagatttgccatctgtgataccaaattctccagcgttacaaaaaaaaaatctgaagtagataagagggtcaggagagaaggggagattccaccacttttggacaagtgagggagaacaatctcctttttcttaaatccttgcttgtaatgctcctgcagattgacctacagattgtaaaggcagagaggttatgactgagctcattccatccaagtgcactggggatagcttcaagtcttctagagttttctctttcacccatttctctctcttcctcagacttccttgaatggcttctgattgacagcttcactagttcctggccattgcccctggtgtgttatttgggatgggcacctttggcagggtctttgcaggagtcactgcttctaagaagtggtgtcagagctacctcctgaggcaactgacaaagcgtagcccatcccaggcacaccctttcccctcagcaccttcttcctcaagtactcagctcctcctctcagcatcttggagaggaggaggaaaatgcaaagaacacccagacgttgtggaaggaaaaaagttcatggatcttttacaacatttgtgttctatggggtgaaacaacatcaacagcctggtcaggctgctttgtaactgaatagtgccaaggtaaaatgcttttgtgtcctctttaagtttagagttcactcaattacatgatatttattaaaagagtgttgtgtgccaggatgttcttgagtctatcagggatccagggctgagtaatctgtacttactgccctttgagactctaggaaggtgctatgggaaggatgtacttggtggcggagtcaggtgtaccgaaagggacgatgggtaagagttgtcagcgctggaatttcagggaagacatctaaattgagccttcaagcagaggtggaatttcaacccaatatatatgtgtatttagagaagacaaaggatgctttgagaagagactaggaatagtattttatgtactacttctgtgtctgggcatgtgagagctcagagccagagctttccttccatcagaaattgtttggtttgaacactgacaaaaacatagcatgaggatttgtagcacatggccaccaggccaccattttcttcaggatcattttagatatttttttttttttttttttttttgcagatgaagtctcttgctgtgttgcccaggctggagggcagtggcacgatcttaactcactgcaacctccaccttctgggttcaagcgattctcctgcctcagcctcccaagtagctgggattacaggtgtgcctcacaatgcccggctaatttttgtattttttgtagagacaaggtttcaccatgttggccaggctgatctcaaactcttgagctcaagtgatctgcccacctcggcttcccaaaatgctgggattataggcatcagccactacgcctggcacattttggatctttatatgtaaaagttgaagcaagaacttgggatgcctaaagaatgatgcctcccagcattagtaagggcagtgtttccaactgaactttgtacagaaaaacccaaacaaaactaaagatgtattttttaggtggtataaattcgaagtgctcaatgttcaagaatccacaataaagaagggcagggatgactgaatagtgataagaactagttgacattgtttagtcatagaacccaaacaaaatctattggttcttaacaacacataaattactccttaggactaatgtaaacagacaaatagaaaggtaacttcattttttaattatctaaatttttcacttttgtaaaagaatcatattataccataaaaatattaaccatgtctccaacttaaattcatgttaaatttccagtggtagctatgtaataaattattgctaagtagaattgtagactgaaagaattaatccatcttctataaatcctgaagattatgttaaccttttccagacacctaaacaagtatgttacatgattcagaaaaagtcatttttgacaagtataaaatgattttgaggtgtgatagcaaattagctgtttcaaacctatgttagagaaattaagttttcagagcaatttttttttgtatttgtgcttatattcctgaaacaacttgcttaaggagagtctccttaaatggaaacataaatggtatacaaatggctatcctctatcataatcttttatttccaaaactcagacaggtttttatcatcatgctctttggactcttaaccatcttcttctacttttaaattctacttctttctcaatacatttttaaacagcatcttgtgatcatttcccagtcttgagtgcctggcactgggaggtgacctgcccacattgctgtcagaattcgctgctggacccctgcacaggtcccaggctgttggttacgtgtttcaatctgcacatcagccatcctcaccagccttcctttgtgcatctggaaataaaaatgctcttgataaaatggttttctaaagtttccattaggttgctcttcatttcatttttcctttcttcttcccaagcctttgtggcttgcatagaattgaaaaaaaaaatgtaatttctccagggctaaaatccaagactttgataggcagtcttaatgcatggggctcctacgagttgctacccgttataagcattgtaaaactcaccctgcagaacaaagagaactgggcacaaagattattctcttcttcaaccatggcaagccctagttttccggtttcctttgccttttccttctttgatctctaaaagaaggtagaagagtagaacgctattgttcagaaaggagaaagctattgcttgtccaaacagattgttttttccttctgtttggcaacctcaatggctctacctgtttctggctgtcatacttcggcttgtgaacagccttcctccctaattttcaggaaactaacaaattaaaggtgcaaatgtcaggtggttactacatatctactggctcacataattcaaaacagagtcatgcagctcctatctaaagctagttccttgccccttctcagtcactaccacatcaagcacaaatgtagatgaaagggtagtgtgtcaaggtgagagctgcccactgggtagtgttactcggtcacttgctataggggacagattagctgccaatcagtatctcatcactgtcattggcgtttataatccaggttcctagccccactggtgatctatttctgtgcctccgcagtgacgccagttgtcctagcaacgtgctggctggcacttcgttaaaggcaagtaagggagtggtggtggaagagggtggcctcgagagggtcagaagggagttggcagtcaccttgctcaaagaggattttccatttccctcatctgggcaggcctccaggaggaaaacgtcacttactaagtgtatcatgggagtgtcacttactaaggatcatggaccacatggtctttctggtacagatagaatcccacggagaataacaaatgaattaatgggtagtccaggcagaatgtggggactgccgggccaagatgttaggcgatctcaaagcatctgatggtatcagtttttcttgtgaattaggttaatgttttgcttgtttatcagcactggcatgcagagttggagacatgagtagatgtttgggaggaatcagaggtcaagggaggcagaaggaagggaaacaccatgacagtccctcttggccccttttcctgttgacaggtctggcctgaaagccatccagtgtaacgagagccttcttactgagctctggtaatttatccatgcacccagccttgaagaggaatatggctcactttgtaatcttcttaattgctctcctctcattatgccacattgaattggcactaaatgactttttctgccattttccgatttggatccaaagaacatagaaatactgtggattgtatcttaaagtccctgtccaaagtggccttgcctagatgaaatctaaaatggacagtcaagtgacattggcagagctgggggcttccctccatggccacttctctgtggaagcccctaggcaatgggtttgggtgacattttctcctgagagtgcttcgtctgtgtggccctggagatgccaagacatttttcacgaagaaagagactcaaggtgggtctttgcaaggaaatggggaacaagggagactgatgaaagggtgtccccagagcattgaagacccacagatgacaggaagtatgacgtatgcattgttgcctttcccttcacgactaaaagagtttttgtagtctcaatgaccgttgtcatttgttccactgaatgaccacactcaagtcgagataattgcatgaaactgtgtgcttatgatgggaaagacatttagggtgtaactgaccatttctagcacgttttgtatactcaacagaaggtatattcactccttctaccatagctgaaataagggctggtagtgaagatctgggactggaattgaaagaaataatttttggaaaaagaaaaactccaagggtagctgttggcactttcagagcatcccatattttcaggatgttttgtatgagataaagtaaatcagttttgtttgacagggtgtagtgtgcccagccaggtcattattttaaattgacaaaatgatttaaatgatagaagacattgtatattcctgaaacaataaatacctattaagtacattttgatacagtggagaagtacagtttttgttttttgtttttttttttggattattatataactgttaattcaacacttagtgtttaaatactcatcattctttatagtgcacaggtcataaagatagttctctcatatgaataagaaatacaactaatgtgaatggcattaaagttagaagcttcaaattcttctctgggtttgatggttgcttttttagaagaaatttggtaaagtagatgatagaccagttaggtttcatgaacttcgtgcttcatattcttttcttttcacaacctagctagatacacagtaaataactggaagcatactagagtagaaagaacccttcttcctgaataagttgtcgttgatcacaggggtaggcgttaatcaaaatattaatgactaggccaggcacagtaattccagcactttgggaagccaaggcgggtggatcacctgaggtcaggagttcaagaccagcctggccaacatggtgaaaccttatctctactaaaaatatatataaaattagctgggcatggtggtgcatgcctgtagtcccagctactcgggaggctgaggcaggagaatcacttggacccgggaggtggaggttgcagtgagccaagatcatgccactgcactccagtctgggtaacagagtgagactccatctcaaaaaaaaaaaaaaaagtaatgactaaggagaagatagggacaccttgggctctgtccagtagcaggaacctcaggctaagaagggacacctgggttctcttcccatccctgcccttttagaccagtggcaagctactctctatctgggtgcctctatttccttatcttccaaaggaagatcattatcactgccacttaacagcatcagatttaaagtattagttcatataagagactctttgaatcacatttgggttcagatttcagacctgccacccagtagctgtgtgtcctttgggaaattgcccaacttctctgagccttatttacttcatctataaagaaggtctgaccacacctaccctgatgacctgttaagagagttaaatgcgataaagtctgttaagtttttagcccagtgattgctccctaataactgtggcagccatgatgctgttatgataaatttcacacaacaaaatctatcatgatgcgttgctgaagtgaacaggtgagcagttgcaacttgctcatctctttgttgtagagacatttctgctataataggagttgtcattaactgtcattgtcattacactgacagtgaattcggttatgtattgttaagaccttctgcttccttgacatgtatatagtagaataattatgacagtgaaggtgacacatttgtcagaattatccatgtgcatatgctgagggcccttggaattttaggtgaattttatagtattagtcaaactgaaaggcacagtgagtttggaaactataatagtctcatctataaaaggagtagggagattcccaaaggctgttgatatgagtagaactctgaaaaagtaaaacattaaaatacattttgatgtggttaccgtgtctaggtggtgataggtaaaaacagtctagtctaattctttgaaatttaggatagaagaaagcctgaagatggatatctacattcttgtatcttctttcagcaaatatttacagaaagagagagagagtgtgtgtgtgtgtgtgtgtgtgtgtgtgtatgcacacacatatgctacaggctaggcacctacagtagttaaaggagctttcagtcactggggaaagaaatgagaaaacaggcaattcctttacaccatgaccagctctctcctaatggtacccacaggttgccatggatgcagaccagcatggcatcttctgggatcagggaagctttcatcctcagacttgaatgaggagtagatgttaaccagaaaacaaagtggatgtatcagttagcatatactgtgtaacaagccatcccaacagttaagggccaagaccacaatcttatgattgtgggtcacctggactattttagtctgggccagcttggctgggactggttaatccagcatggtctcactcacatagctactagaaggctggtttgcctgagagatgggtgatcttcagctgggacagcttgtctctgcttcaggtggcctctcatcctccagtagactagtctgagcttcttcactttgcaggctaagggttcccaaaagcagcaagaaagggcaagccccagtgcatgagtgcttttcaagctctgcttcaagatgcttgctaatttccctttaaccaaagcaaattacttaatttgttcagttcaaaggatggggaaactccagctctagtcacatgaggacaacatgagcaaagctcaaaggtaagagagaacatggcatgttggaagacagcaagtagtttggagtggctggagtcaggcatatgtgaagtctcatgaagaaaaagccagatcataaagtgtcttttcagtaagttctgctgaggagtttagagtttatcttgaagacaggggagtggtcattgaaagagtttaagcaggatgttgacatgatcaatgagatgtgtagagacatggttaggtggtagaagcctaaaaacactcgttagcctagacaattcaggaagtttccaaagagatgacccagggatagcataggagaagatggaaggacttgactgagaggtggctcaaagctgacgtgtactttcagaacaatgtgaccagaaaagaggttggaggcccttcaaggtagagcagaaaagacagaggctcaggtcatcagcaatatccgtatgaatctggtgggagaactccaccagtgttcctcacctcgctcctttgtgggatcctgccagactccaatgtccttgggttctaaataaacacctaccaaggggctgagtcaaagagattccagtctctggaagtgtcttcttgtcattgtcatcacccagccaaagactcttttccttccaacatgtttttccctttgacctcaaaataaacaatgtgttctaaaggctctggggcactctcaaaatgcttctctgacctcggataggaccatgcttacccattaatttccagatctgaccttttcactacacctttaagcataactctttcaaaaggcaaaaatagaaatgactgtttcatttcaccaaattcaagtcgccaagagtgagaacgtgtggttttcaccggtacgtttggggaccagtttgttgtcactgaaactgcctgatatcgggtcggagtggctgggtatttttcagtccttggggttataactcaaatgttggaagtggtatcttttataggtaaaattgagggaggggagcatcaaaatgtgtgcgatgcagataataatttgccaagttttctaatttttttcattaaaaaagaacatacagaagagtctacaagtagggcaggcagccttcattcctatgctcttttccttgagggacaccttccctaaccaaataattgaaaataaatgggaattgtgggaacagaggaagacaagaaggaaaactaaaaacccaggacctaatcttccaggggcaggcaggccacttttgtagctcagattctgaccttttctccaatcaaagagttcgaacagactgactgattggagtgctctgtcagcattaaactcaatgcagggttctgctctggcacctttaggggtggtggtttagaccctctgcgtgccatgtcttatcaccagcactgctaactgaatgggatgcattttcaaagacaggagagggtttgaaaaaccccagggcatgctcggagcctgcaggcatttgtttgctgctgagaaccatggcaagcatttttgacatttttatcagagtcttagttaaacaattatgtggaggactgataaagaagtgtgtgataggagacttcataatttaaagtgcccaaatttggtgagctttatactcatgtgaaatggaaatgaaaacatggcatgttttggaattcctgattctgcttatttgctttaatagcagatcattgcataaacactgactcattgcattctatactgaaaggaagatatggtttgctgtgttcaatctggtctggcttccagaacacagtatagaacaagtgccagaagaagggatgagctcagctttataggtgactggagagatacccaattccatgttttgtgctgtacaaacacatgaccttacatgaagttttgcataaaatattgaaacaatacatttctctttataaatatgtatgtaatctgttctagagtgtatggagtagacagtaaaaaaaaatagaatcttcttatttttggaagtggggtgaagacgcaggtgtgcatatgctgccacctgcgtgttatttcactgagttttgtcaggttcttttcttactcatctgcactttgtatgttaccttaagcgctgtaaccattctaagctgccagggacatgggtatgcaatcaaagtcaacactgtgattaaaaccacctcctgttgtttacctttttagaaattttaataatacagtcaagtctgaaagagcagaacttttctcaaagctacacacttggttgcctcttcttgattaatgcatgggggtggtcactgtaacctaaggtctgacagatggtgcggagattgatgaagttaaggcctgttaggtattccgagtgtcttataaagaaaaataggctaccttaattcaaattgttgttgctcttccaaccttctcttatgtaaactccctgtatattacaatgacagactctctctctttctgtctcacacacacacacacacacacacgcatgcatgcacacatacgcacactcctgacatgctctactgaaagctgcccagctacagagaggtgcgaatctaatccagggcacatggctgctttgcatttcactggctgtctagtgtcactctatgatataggcataaggtcatgactgtgagctatcattgtcacttatcttaatattaaaacccctctgatccaatctgtctgccttatctattacatcattcacatatctagattcttcaaacttaactactcattgcagcaaactcaggaatgccgagctctaaggcatctccatttacttcgttcatctcaatctcaaattactaaccatagttcagtttcaggatgacactgaaaattcaaaattacttcctgtgattaacttacattgtgatggttgggaattatttcgcagaagacctgttcatcttctgatgaagcccttttcaagttttgaattgtgtgtgtgtgtgtgtgtgtgtgtgtgtgttttaattgccagaagtctttcagatagcagggagattattggaatgagaaagcaaagcttgtatgaaaacttgtggcaaaaggtcatctgtgctgtgggggaaatttcaaagtaggcgcagtttgtttccagtggttcctgcctgtcctttcagtggctggtcactctctgttccctttccagacgaatctttcccctcttccaaatgcctcacatcagtctaggtaccttggttggcctgtggagaaaaacagtcttgttgagacactcacattaagctgatagagaccttggctaggataattgcatttttcaaaggctaagggttggaaggatttaatttttctcttaattattttttatagagatgaagtctcactatgttgcccaggctggactcacactccctggcctcaagtgatcctcctgtcttgacctcccaaagtgctgaaattacaagcatggcctgaatttttttaatggtgatttcagctgatcccaggggagatcttttgggtgtcatttttcaaacagattaggaagcaagcagctgtctacctaatcagtctaaactacccattctgacttctgtccaataactttccatataaaatagctaacataataataatcagataactttgcatgtaagtttcaaagctatggtatagttcaccaacataattttccagttttttttattatagtaaagtacacataacataaaatttactgtcttagccatttttaagtgtatagttgtacattcatattgatgtgaagccatctccattgtcttgtcttcacacctctttttttctggcaaaactgaatctagacccataaaatactaatgctctaccctccaccctagcccccggcagccaccattctacttgctgtctattattttgactactgtaagtggctcatataagtggaatcatgtagtatttgtccttttgtgcctggctcatttcactgagcataatgtccttcaggtctgtctgtgctatagcatgtcagaatttccttcctttttagactgaataatattctgttgtatgtgtagaccacatttagcttatccttcatctatcagtgggcacttgggttgcttccacctttagtttattgttaataatgctgctatggatatgagtgtgcaaatatctctttgaaactctttgaaaccattcatcaactctctctttttcttttttttttttttgagacagagttttgctcttgttgcccaggctggagtgcagtggtgtgatctcggctcaaaacctctgcctcccaggttcaagcaattctgttgcctcagcctcccaagtagctgggattacaggtgcccgccaccacaccaggctaattttgtatttttagtagggtcagggttttgccatgttggtcaggctggtctcaaattcctgacctcaggtgatctgcctgcctcggcctcccaaagcactgggattacaggcatgagccaccgcacccagtcttcaccaactctctttcacgtctttattagatacaagtgtttgaagaagccttgcatctacccactttgaaccttttttcatgatagaactgtaggtagactttctgcctagtagtgttatttgaagcatcctttctgctgacctctttcctgaggcctgaaatgctactaatagtagttcagtcctcaagtatcaagcaaagccatcagctagttttctattaaaatgcaaatgatcctggggcagaggccacagataagatattagcaccttggtgtgaatttgtttaattagatcctatcttagaagctttctttaaccccttgcctagttcttcactaattgctccctgataaggtcttgcattattactgcaagtatcacactgtattaaacttatttatatttttgcttctcctgatagaatagaagcttcttaagggcaagactcttgtataattgctgttggtttttcaggccctaatagaatgtcacagacaactttcaataagctactcactcattctttcatgcattcattcattcatttcactcatttattcatcaagcatttattgggtgcccacggtgtaagtgcattttaaaactctgcctttctagaaggtttggacagccaagggccagctctgttgcacagttttggcagattttagaaaccttaaaatctaacttcctgtatttttaggtgcagggacttggtccagatgagtggatcaacctctgaaatagttttctatcacagtcctaccttttttttttttctgcttctattcagaagaagcatcgatctaagtaagtttgtgttctgttcaaaagtaaggtgatgtttcaatgtatattctcaagcatctgaaaacttctctagttgctctaaatctcaatatttccaatatcagccatgtacagtttttaaatgcttgcattctcttaggacattgttaacaatctgcttagaaaggggagtgacttttgcctcttttggctaatttgctttgcattgatttgtaactgtgtacttcagtatataccagcaactcctagcccagggatagcatatactcgcttactggttccagtgactgttcattcatcccacagtggcttccctggaaacaagttactctgataacaatttgatggtacttccctttataaggtaataaccagtccgggccaggcatggtggctcacgcctgtaatcccagcactttaggaggccgaggcgggcagatcacgatgtcaggaaatcaagaccatcctgactaacacagtgaaaccccgtctctactaaaaatacaaaaaccaaattagccacgcgtggtggcatgcgcctgtagtcccagctactcaggaggctgaggcgggagaatggcgtgaacctgggaagtggagcttgcagtgagccaagatcgtgccactgcactccagcctgggcgacagagtgagactccgtctcaaaataaaataaaataaaaataaaaataataataaaaaccagtcctaaaccaaattcttactttagtctctagcctcagagtttattagttcttagtaatgttactatgaaggcaaataggagacaaattattattctggtttttattgttactgccactgcaattcctatgattattgctataattccctatttaataggtaaacaagttacaacatattcgatggtcactagatagaaatagaaatggaatgtctttaccaagagaatatccgtgttttacagagaacaggaaacaagtactaaatggaatcttcagacaatcttttggtcttcttgtaggcagtggttcagcttttttacctactaaaattttggacagggttgttaacaggcaatacagtttaaaatgaactgttttaagttttcctttctgactttttcatactcctacattaatgcaataggattgaaggctacaacaatgataattgcaatatgctgaaataatgaactacagtaaatagctatagtgaatgtatgcccatagaaaagaatggaaaacaaatggcttttgattaaaggtacttattgtaacagatttcaaggtgaaattgttagttcagaaaagatggtagatagagtctttaaaaatactgtcactgggatgcgtgttcttctataatgctccctccatcccccacccgaagaaacacacactcctccctcctctgcatgtaaagcagtagttttgacaaataaaaccaaacagtaaaacctgacactggtgattggaccgtgcgtccctctggtttgtggatgaggagcatatctccgtgatagaataaccacgcttcatgctaactcccggccacatcgctgcatcctcttcatacataatttgcatcatggggtgtttctgcatatgttgtgcattttgatgttatttttagctacaatttttaaaacaataacatttttttaaatagactaatcaagaaagcgcctccagagtcaagaaaacaagtgctggggatgtgtgggtgggggtctgtctccccgcccagggcatttccctttgctgctgttgttactactccttccattactttttgtgactttagctttttgaaatttccattcctttgttttcccttgtgcatcaggatgtggctgttgaagtcatttatgttatgcgaggctgcaccacagtcatttaatgcaaacactggcttttgtgtaaggcactgactattctaccctcagcgaggaagacgttattggaaacttgagttatgagatggaaagaacattaatcctttcattgaaaacattagtcttttacatggattctctgtaatagcttgaagagaaattaaggaaatacaaactagtaatattaaaaatctgccatgtcattattatctacctgcccatagatgttcaccaccgttagcatttgagtgtgttttcttccagaagattttctatggatatatatatatacaaataaatacatgtagctttacagaaatagaatcgtgcttgatctacttttccgaaatttcttctctcacattgcaaaagttgtgaatgtctttccatctgaattattacagattttcaaaatatttttctggctactgacttttccagtatatgaatgtaagagtgaaagttcttcgatttcaccagttggatatgcccccttttctcttttctgccaatatcaattgtactgccctcttgcgctatcctaaatatgatcagatgagaattctgaaagagaagaaatctaggaaccctacttgatagagagttatcctcttgggttccctcctgacatttaggcctttttttttttttttttttttttttttttttttgagatggggtctgactctgtcacccagactggagtgcagtggcgcaatctcggctcactgcaatctctgcccccgcctgggtacaagcgattctcctgcctcagcctccctagtagctgggattacaggcacctgccactgcgcccagctaatttttgtatttttagtagagatggggtttcactgtgttagccaggatgttctcgatctcctgaccttgtggtccacccgccttggcctcccaaagtgctgggattacaggcatgagccaccgcgcctggccacatttagtacttttaagaagttattcctcttccatctcagcttcctggacacagttcgctatgacttttcttggaaattatgcattcccttagaatccttgtattttctgtttactttccctcaaagcaaggactcatgacctcacctgtagtgggcctccccatctctcatgtctttatgtggcccggacttagcagagacacctcttggtacatcattttgattgcatcatgagctttcccagagtctggagtgactctgtctttcagatttcattttaacctcctaatcacaggctatctttgatgcacctatctttacctccagttcttctgctaaagaactggaggcttgtggctcttgtcttccggtcaaacatgatgctctgctgactactcttccccatgcattcatcccaccccagaccctgcccttgccctcatccccatctgaatcattgcatcctcctagttcttggccaaaaaactggctctcctctagcccttcaaaccttgcctgggagtcatctttatggcaccttccctgattttttgttttgttttgttttgtttttggaaatggaatttcactcttgtcacccaggctggagtgcagtggcacgatcttggctcacggcaacctccgtctcctgggttcaagcaattctcctgcctcagcctcccaagtagctgggactacagacacctgccaccatgcccagctaatttttctatttttagtagagacggggtttcaccatgttggccaggctggtctcctgccctttggtgatcaacctgccttggcctcccaaagtgctgggattacaggcatcagctaccacacccagccgttgcaccttgcctgattaattccacttggctctagctagtatctggaaggacacctgggaggaacacttcaaacagctgtcagtgcagtgttgttgttgtttttgttttttaattaataggcttttttatagaacagttttaggtttacagaaaaattgatttgaaagtacaaagagttcctatattcctagcctccccgacccctgacaaacagtgtccctactgctaacatcttgcatcttacatttgttgaaattgaactaatatggatacattattattaactaaagtctatagttcatgttagagttcattcttcctgttgtacattctgtgtttgacaaatagatgacatgtgtcctaacaactctttgtgctctgcttatttgttcctcccaatccccaaaacccctgatttttttttttttttttactatccctgtagctttgccttttccaaaatgtcataaagttggaatcatacagtatgtacccttttcacattggcttctttcatgtggcaatatgcgtgtaagtttcctctatgtctttttgtgtctggagttggttcctaccggtgggtttatggtctcgctgacttcaagaatggagctgcggaccttcatggtgagtgttacagctcttaaagatggcatggacccaaagagtgagcagtagcaaggtttattgtgaagagcaaaaggacaaagcttccacagcgtggaaggggacccaagtgggttgctgctgctggctgtggtggccagcttttattcccttatttgtccctgcccatgttccatttctgttctgtcagagtgccctttttttcaatcctccctgcgattggctacctttagaatcctgctgattgatgcattttacagagcactaattggtgcgttttacagagcacttattggtgcattttacaaagtgctgattggtgcattttacgaacctcttgtaagacaggaaagttcctgattggtgcattttacatcctcttgtaagacaggaaagttcctcaagtccctacttgacccaggaagtccagctggcctcacctctcaatcccccctctaaacaggacaccccagctgctgttgggaactgggtgatgactgctctagctacttcctgctggataggggtgaagaaggggccctgcagttgtagtgccctccagaggggaacactctaggccaaagggctggtgggtcagtccaggggtccttggtagaagttgtgagttgagctcatttggggttccatttgtaagaccatctgtagcttgatggtatcgatcctggaggaaacaaatttgacaaagaggttaaaaacacagggcccgaaggtgagtaatagcaagatggctgtcatgggacgtagaaaggggagaaaccatgttgcccaactctagaggttggtataagagtttgaaaggcattgtctgatttcagaagccttttcctgtaactgctgggcagcatcttgtactatccctgagtggttagtgtaaaaacaacagtcttctcctaagaaggtgcagagtcttcctttctcagcagtgaggaggtctaggccttggcggttttggatattcactactgccaaagagtctatttgggattgcagagtaaggatagattttgttatttcttgcaaactgtcttgagaaatcctttgagagtgtgtggtagtaggataatgaagtagataaactggctattctggttcctgtagcagtggctattcttaaccgtataagtaggggtattagttgtatggccctgtactgacggacctgagctttgaggggcactgatagggtctgatttcctgcggtaatgttaatgttgggacttaggaagactaaggtacaggtgcctgtccagttagtggggaggcagatgtaagttgaagttccacataagaatatgccttggctgggtagacagaactggttgtgtatgttaaaaaggtgtgtgagtttgttgttttcattttcccatactcctagagtacttgccaaggtagtctggtgagtggctggaaaggggtgttgggagcaaactgagtgactccctgtgctctattttcccattggagaaaaaactgttttgtatctactaggaaccattcaagagagtgattgaaagagaggatgagaaggtattccttagtggtgggggtgctgctgcagggggtccaggggtgaatagtcatacagggagtatgtttgccattacaaaacctggactgtttgttaagcagggaggaggtgatgatttttgggggccctgagaagcggacaagccatctgaatagagcggtttgggtgccttggaagttactatgatcatttggggcttgaagttggagagtgtaattacactgatgggatagtaggtgccccaggggcaggcctgataacaggttgcgttggatgcataacggggcttggaaagttaagatggtattcacggttacagggcttttcattgctcatgtaataggtgaggttggaaatgtaagagcgtaaaagctggattgcatgtaaaaaaggttgatgtgattaggatttttgtcccggcaggagctacagtatatagtcctgctgcaaagagaatggttagtatactgcttaataatgtgatgaaactgtaaaaggattccattaaaggggcaaggagtggtgttaaagattatgtaggttttcacttatcctttttaaataggaaagagtttttccttaggatcagctataggggcctttttagtctgggatgtttccttctgaaataggagacacaaatcttccaatggttcacaggtttatcgaggctggtctggctgatcttgggactcctgagctgatggtcctacaggttcttcagggggtgtccaaagtttaactcgcatgtagtgaatccaagattccactcctgccaccttaactgcagtgggggtagagaggattactgagtatggtccttcccacaaggaatccatagatgaggaggaagaggggagggacttgaccaacagtaaatctcctggttggaacaactctgttcccttgtctctgtgacatcctttgggtaggtttttaacgttttgttggtattttgccaaagaagttatatctttgaccaacttggccgtttcctgatcaagtaggaggtcatttgtgagaaaaggtcatccatacagcacttcatatggactgagccccattttgtgaggagaattttggattctcaacaaggccatgggcaagagagtaggccatgggagatgagtttcttgtgttcgtttccttaagtgcctcttgagtgtttcgtttgccttctcagccttccctgaggattgtggcctccaggcacagtgaaagtgatattgtatccctagtgccctggaaattccctgagttaccgtggctttaagagccggaccattgtcgttttgtaagctttggggaagcccaaatctgggaattatttcatgagttagtactttaaccacttcctgagccttctccgtcttgcaggggaaggcttctatccaatttggttggtcaacacagaccaacaagtattgaaatccccttgacttaggcatatgggtgaagtctaactgccagtcctctccaggatagtgacctattctttgttccccaaaaggggccttacgatggaccaagagatttttcctttggcacacctcacaggctttgactacttgttggatggtctggaggagatatggccccataaatagggatttggccatttgatgagtgttctcaaacccatgtgaaaagtttggcagggggtcttaagtattttccactggctggcttcggatatgagtacctttccctcttctgccgttaaccaccccaaggggagaaaactatgcccccgtgaaagtccccattctgtttcgatcagggagtactggggcttaatctcttggagggggttgttccataccatgggtccttccataggtatttctaatgggaggttctgcctggcagcaattttggcctcagcatctgcccagtggtttccttctgccttttctccttcacctttttgatggcttcagcagtgtaacactgccacctccttgggtttttgcactgtgtgcaataactccataatttccttgtggtatttaatgggggttcccccagaggttaggaactccctttctttccatattgcagcatgggcatgtaggattagataagcatacttgctatctgtatacacatttattcttttttcctttcccggttctaaggcttgggtaagttctgctaactaggcgctggtccgtggggggaagagacttactttcaagtactgttacatcactaactatggcataacctgcccttcatatcccattctccacaaatgaacttccatcggtatataggttaaggtcaggattagctaagggtacttctaagagatcctgttgggaagcataagtctgggctacaatttgttggcagtcatactcgattggttctccatcctctgggagaaaagtagcagggttgagggctgcacacgtgtgtatttcaagcaccagtccctgaatgagtagcgcctggtacctgagtaggtggttttctgatagccataaatttcctttggcacctggtatgccatttacatcatgagtagtctagatggtgagatcctttccttgtattattttgatagcctctgacactaagatagccactgccacaactacccgtaaacagtgaggccagccttttgctactacatcaatttccttacttaggttgtggggttccttccttactggttgtggggttgtcctacaagtctgagtaaggactccaagagctattcccgctctctctgtgaggtataaagagaagttttgtcctggggaaggcttaagtcttgagtttgtactagggcctgctttaaggttttgaaggctgtttctgcctctggttcccattctactagatgaatatttgccctctcggtctccttgattagagtatagagtggcctggccatctcgctgtatccggggatccatagtcggtaaaagccagtgatcccaaggaacccccacaactgttttaatgtgttagggcaaggacaagccagtataggctgtatttgttctttgctgagggccctggttcctctggctaggattaggcttagatatttgacttgttgtaggcagagctgggccttcgatttagatgccttgtacccttgattagctagaaagttcaagagatctagagtagcctgctggcatgaagcttccgaactggtagccaaaagtaaatcatccacatactgaaggaccagcatgcctggacttgagaagtggcctagatcttgggacagtgcctgaccaaacagatgagggctatccctaaacccttgaggcaagaccgtccatgtaagttgggttttgtggtctgtgggatcctcaaaggcaaagagaaactgggagtccaagtgcagaggaacgcagaaggcagcatccttgaggtccagaacagtgaaaccattctgcttcctttggtatttgagagagcagggtataggggttgggtacaaccggatatagaggaattacttcctcactgatgagtctaggatcttgcactagtctccactgacgattcagtttttgtactcctagaattggggtgttgcaggggctactgcattttcttactaagcctcgaacttttaaatgtataacaatatcctgtaatcctttatgagcttcaggccttaagagatattgcctttgataaggaaaagtggtggggtcttatagcctgatttggactgggtgggcattttttgcctttccgaattgtccttccaatgcccagacttcagggttgattccctcctcaagtaggggacaacaaatgggtaacttgttccccatattcatatagttaatggctccagctttggctaatatgtccctccctaataagggtgtggggctttcaggcataagaaaagcatgtgaaaagagcaaagtctcccaattacaactgaggaggtgggagaaatacctggttacaggctgtcccaggattccttggatggtaatggatcttgaggacagctgtctggggcaggagattaacactgagaaggccatgccagtgtccaggaggaagtcaatttcctggccctcaatggctaaacttgcccagggctcagtgagggtgatgacatgagctggtgcttgcaccaggcaccctcagtcctgttgttggatcatctggttgggggcttctggcccggagaacctttgtcctctggggcagtaccccgtctagtgattgccttggcatagtggacatgggtgagggagtagcttgtttcttgttggacagtcttttttaaggtgtccttgcaaaccacactgataacaagccctactgggtgattggcctgctccattttctgtcctctctgaaccaccaaggtttgtttgtctgagggccatgactgaggctgcggcctttctcttatctcgcttttccttttctgcctgttcctcttggttcctattagagaacaccgcggttgccaggtttaataatgcctccagattttgttcagggccaagggctcgcttttggagctttctcctgatatctcagctgattgggtaataaacatcttttaggatcaattgaccctcgagggagttgggtgacaggggagtatattttcttaaggcctcccatagctgcttgaggaaggcagtaggattttcttcctttccctgagttatggtggacatcattgaataattcatgggctttttcctaattctccttagtccttctggaatacaggtcaacagatgtttgcgactccagttcccatgatctgagtctaggtcccagtggggatccataatggggatggcttgctgcccattagggaatttgtccctttcttcggctgtcattttgtcatttacttgactaagataccaggtatctccaaattctcgggctgcagctaaagctgcattcttttcattaaaggccagggtttgatctaacaatagcatgacatctctccaagtgaggtcgaaggtttgccctggaccctgtaggacatctatatacctaccaggatcatctgaaaactttcccaggtctaccttgatctgctttaattcagagagagagaaggtcccatgttgggccaaattcccctccccctacagcttaaaggagacataactgatagcctgaggggtttggtggtcctttggaaatttctttgcttgtttccttctggatggaggagattagaggaggctcatcattaataggaaggggagctgtagggaggctaggatatggaggtaatctgagaggtcctcctgtggaatgtaaatcgccagctttgcatagttgtggattatccttcagtaaaaagaaagcttggacataaggtatttcactccatttcccttccctcttacagaaaaggtcaacctgcagaatagtgttgtaatttatacttccctcaggtgaccatttttccctattagagagataatattaaggccagaccgtagtgcagaaaaaataagccgcttctttttcagggtttgcgggacaaattggtcccaatggcttaggatgcgtttcaagggtgagcttgttgatgcctgggtgtttcccatctgaaagaaaaaaccgcctgcagttttttttttttttctcttctccctgcccaagaacccacaacagtccctggatcctgctgttcggaatagctgtgctcaccaaagcagcagcggaaacactagttttcctcctagaccacaaaaaggactgaggaaggtcagatttagtggcccttaccaatggattctcaaaaacctgcacccttgcctttcgtctttagaccacaaagaggactgagaaaagtcagatttagtggcccttaccaatgcattcttgaaaacctgttagagtcctaagtgttttctcctgttgttattaggaccttacccttgtactataaagataatatgcctcaaaatggagtggagggccataccctgagggaaggaagggatctccagggttggaagagtgatgcgttttgtcctcacttatcatatgaataggaaggatataatttctgagtctcctcctatcctagctttgggaatagcctttgttaggtctgctagtctgaggagggatcctaaaattccagatagtcccccacaacagggctttggacaaaaattatgtctttctgattggtgagcctgggtgcctaaagaagggagcagagtcctgaaatttatattagaaatcatccttataggagaaactggaagagcaccagggacagggagtggtttttagaagcaagactaaccttggagaagagaggcgggagaaagtttgtctgacaggtgttaggacccaggaggcaagggtcaggatagataggatagatgggtgagtcttgtttgggctatgtaactttgagagttctgctcatggctgcagggccaaccaactttttgttgagaccccggagctgaatggctttcctctctgtcgaccctaggcttagcccggaagtgcaggaaaagcagaagctggttccaggcaaaccaatgctcctgactccaaacagtcgggggttgttagtgagccctttcccagagagcctgacatccatgtccttagtcctgtggccatgctagttgcttttaactggctgacaggtgcctagttttagcccctgaattctaaggaaaaataggacagaatagcaagcaaaaggggtctgatggtactcaccacgttgcaatatctgggaggatcccccaagatgtgtccagagttggttccagccggtggattcatggtctcgctgacttcaagaatggaggcacggaccttcacggtgagtgttacagctcttaaagatggcacagacccaaagagtgagcagtagcaaggttaactgtgaagagcgacaggacaaagcttccccagcgtggaaggggacccaaatgggttgccactgctggctggggtggcccgcttttattcccttatttgtcccctcccatattctgtttctgtcctatcagagtgccatttttttcaatcctccctgcgattggctacttttatactcctgctgattggtgcattttacagagcgttgattggtgcattttacagagcgttgattggtgcattttaccaagtgctgattggtgcgctttacaaacctcttataagacaggaaagttcctgattggtgtgttttacaatccttttgtaggacgggaaatttccccaagtccccactcaacccaggaagtccagctggcttcacctctcatttttatggcctgaaagcttatttgtttttagtgctgaataatattctattgtatggatgtaccacagttcatgtacccattcacgattatgaatgaagctgctataaacatttgagtgcaggtttttgtgtggacttaagtttttagtttatttgtgtagataccaaggagcatgcttgccacattgcatgttaagagtatgtttagctttgtaggaaactgccaaactgttttcccaagtagcttactatttgcattcccacccgcaatgacttgagagttcctatggctctgcatccttgccagcatctgctgttggcagtgtgttggattttggccattttcataggtggtatcttgtgtttgttttaattcacagttccctagtgattcataatgtggagcatctttttatgtgcttacttgccatctctatgtctaatttggtaaggtgtctggtcaggtcttttgtccattttaaaaactgggttgtttgttttctaatagtgaagttttctacagctctgttgtgtggttacttcttttttacatcaagatgagtcttactacctggttagattgggtgttacttgtagagatgctctccttccttccttctgtctcctagagcatttgccacacttcagatcctcagtaaatacagtcttcccaacccaatgcctgccacatgtttcctgacctcaagttcatatatcctctcgcattccctttactcctttccatacataacagtggtggtcactgctgagtccccctgaaggtgagcttatctacctctttttatatccaagctgcttaattgctataatatccaagctcccagatcacagcttttagttctttttctgaatctgaactggtgataagattaagaaatctcttggttcttttgcattaatttcttggttttgctgtctactataataatttaatagcatattttaaaaatgtttctgatggctgtttagttttgtctgctgactacaaaggttgttttgacctcatcttgctgacctgccaaaagcactaagtctatggcagtaagagagtggaaagtctgttccagtctctgtataatacaattacatgtactgtgtagcaataataattaacatgggaggaaatcagtacaaattagggatattcctgaatcattggctacactgtagataatgcagcttctcaagccagtttgttacaaatgggctacaggtatatccaagtatggattgcctcagccctcaggcagccttgacccctgaggctacagagcccctagcagggggggttaaccatttatgcaattatgctgctgcccagatgttattttctatacaagtagttcctttagagagagcaagtgcaagccccaagcactggcacaatatggagtggggaaaacaatgattttgaattcagaagaattcagttcctggtcagctctctgatggcagggattttgtctgctcagctcactgctctatccctgtacctaaatcagtacttggcacactgtaagcactcagtaaatatttatcgatctaattcttctgtttttttttttttttttttttttttttttgagacagagtctcgctcttattgcccaggctggagtccagccatctcagctcactgcaacctccacttcctgggttcaagcgattgtctgagtagctggaattacaggcacgtgccaccatgcctggctaaccttttttgtagttttagtagagacggggttttgccatgttggccaggctggtcttgaactcctgacctcaagtgatccgcctgactcagcctcccaaagtgctgggattacaagtgtgagccatctcgcccagcttcgatttaattattgaagcatacttgaattcaagcatgttacttaatcctctctgcacctcattttccagaattagaaatatagtttattcctatacagcagatataaatttatgtgtagacagttgggctgttgttgtaacctaaaagtgacatatgcacaacctgtagcacaatgccaggtacagagtaggggatccagtgggttctttcttaccctctttcatttgaagtttttaaagtatcaggtgaagatgatgatgatgatgataatgataatgaaagtgatattttttgcatacatttcagtaaagttcattaccttacactgatgtaatcctcagagcaattcttagacaattatggttttttaccccctctttattttattttatttttgagacggagtctcactctgtcgcccaggctggagtgcagtggcgcaatcttggctcacttcaacctctgcctcccgggttcaagcgattctcctgcctcagcctcctgagtagctgggactacaggcacctgccactacgcccagctaatttttttgtatttttagtagagacggggtttcaccgtgttagccaggatggtctcgatctcctgaccttgtgatccacccgcctcggcatcccaaagtgctgagagtgtaccccctctatcaatgatgagactgatgctgagaaaagtaacatgattatgtaagattacacaagtgaaacacaccaaaaacagaccttgaacccagtttttttattttctcacgtcaacttttcctccacaccaaatctaataaaattttataaagaattactttaaagactaaatcactttcgactagcatgttgtctggatgcaaatgatggtgataaagtaagtttaataatgcttaaaggaggtaaacaattcctaaaccttttaaaaaatctagtcagctaaagtaggtttacgctaaactttcatcagaatccttaaattctaaatcttgaacttttaaatcagtaatagagttttaatgtgaattaattgtctgtaacattttcaaaagataaaagtgataaatgcacaaacctacctgctattataaaacttgttgtggtggaatgagacaagaatagatgtactataagaacaagagggatatgaagaggcaggtttatgtcgatacttaaaatacatttgacgccatccttttgacaggaaggaatgtctttaaaatctcacaccagtgagagtgggaaaaaaatcagccatatttctgctttttttaccctttcattggaatgctcagtcacttggtctactctggttttgattcacaaatgagttttcagaaatgactgtcccactggctttttaaaagaaaaattcagtttttcctctgaagactgacacacaatcactcagagatggataatcctaaatgttttccttttccagctgaatttaatcttatgctatcaacaaaatctggaaaggtttactttctcatatcattcattactagttatgaattctgaaccgtatttgtaacctgttcatcacatattcatccctgcatgtattcattccctaaatatttattgaatgccagcaatacaccctgaactcggagaaaacataatctttaccctcaaaaagctcacagtctggtgctcagttgaccaaacatcgtgtttcttttctaccgagttgcaggtcttctctctgtggatgtcattgaatgtcgtttgcagaattctacttgctatagtaggcatctgtcttgttcatgagccacattacaacctcgtgtgttataggcaaaaaggcaatctaagaacggcctgacattcggacgcctaaggggacttccctagtgagggcacaagacagacaaatcccagaatattttctatatgcagaggaaacttctctggcatcttagaaagacaaagacagcaagactgaagatagaaacaggaggatagcaaccttttaaacaacttgtttttgtgaaatttgtttctgtttgctttgagaatgggggaaaagagaactctaattacaaactccacgtttctttcaactatactattttctttctttttttttttttgagacggagttttgctcttgttgcccacgctggagagcaatggcacgatcttggctcactgcaacctccgcctcctgggttcaagtggttctcctgcctcagccttctgagtagctgggattacaggcatgtgccaccacgcccggctaattttacatttttagcagagatgaggttcctccatgttggtcgggctggtctccaactcccgacctcaggtgatctgccggccttggcctcccaaagtgctgggattacaggcatgaggcactgcacctggcctttttttttgagacggagtctcgctctgtcgcccaggctggagtgcagtggtgtgatcttggctcactgcaaactctggccctcgggttcaagtgattcttctgcctcagcctcctgagtagctaactaatttttgtattttcagtagagactaatttttgtatttttagtagagacagtgtttcactgtgttggccaggcttgtctcgaattcctgacctttggtgatccacccacctgggcatcccaaagttctgggattacaggcgtgagcaactgtgcccaaccagttatactattttcaatcctatataatttgtacagctgaagtggcaactgcttgcttttaaatgggaagagaagatgtccccatttaatgcttagaaaagattgacttcggtttaagccaaaggagcatcctggagaaccgaatgattcatgattagtaattctcaaggaatggccatgtggctcttcatagcgttggcccttgggggggtctactttaatctttgttctaacccccgccgcccctgttgtccttttaatcctcatggatcaggtgcgttcacagataaccactaaagtgaggctgaaagaggttaggatggggatggacacctgtatttctgagaggacctctccatgatgtttaggaatggggttgacatccttcacctagaaggtcctttcccaagattggacattgattttggtcgctggagcagcctcatcagcatttctacaaggtccccagaagggaggaagctattcattgaatacttcatatggaggtggttttatgttatttttatgagatattaaggaatcttcagaaactcatagcatctccatgttgcagataaaagaggctcgatggaatgggagtgagtcagttcagagttactctgctaataataaacgtgctggctttgaacctacgtctctctgagtaataagcccctgccctctcttccaaagcacattccttcccttgaatcagagagcactagatgggaagggtgatgggagctacattatcactggcagatggaactattcagctcctgtccttccattctctaagaaccatgcatgtgtgtaaacacatgttgcatcagtgattgttccaggctttgcctacttgctcccaaacatgtgaaaaagaagaggaagattaagtaagtcattcatatattacttatatctgagtgtttgcaatcatataggggagcatagttcccacaaggaccggtttttgtaaacttttgcttctctttcctgtatttaggcattatatagctatggcagtgatcacccacaggtacaaattctgtatcattcattgcctttacttggaggtttacaaatatttttagtctctacttctttttcaaacacaatcttgaaacctcaacatatgaaacgaataaaggaaaattttgttagcataatgtatgttagatttcagcgtgtaatgctgacttataaaatcaagaagaaagaacaatgaagctttgtgatgaacacagaaatttgaaagcagtgttagagatgacagctgcaatcttctttaacttcagtttccaatttattgccttttgttgttaggtatattttttatgttgttgtgcagtattgagaaaaccctgattccctaaaataaggagttgcaaataataatgagttgttttatttttttaaacagttaccttgcaagctcaggatatgttttcctttaaacttatccacttaaaacgtgttcacttaaaacaaaaggaagaaaagaaatggcttctttcaaagctgatatcgctaacaatgtgaaaccatttacattttttaattggtaagcctgcgatttggaggaccaatgatagcttcctctagcctaaatcttccattagagggagaaaacactttttaaattataacattaatgagatgctcattgatgtacttaaaaaacaagaagaagaagaaactcataagcctgagggagggctcatctctttcaattttagaaggaagaaattgtctttgctttgcatggtgggtccaatcttgaactttagatttaatctctgacattggctaccataagcatggtatgtctgacagtttaatgccaataatttaattttattacaccattttatactacatgtttatttattacataccaaaattcactgaggacaagaactcagggtgttttgtctggtcttggccgttaattgtccatgatacactcatgctgtactagggtgctcacttgtgaaatttcatgcaagtggacgtagggagaacttaagtttatatgtttaaaaaaagcaatggtagcgctacaacctttctacctgagaaacaggatgtcactgagatgacgggatacctttattttgagatctacacaagcctggcagtatggtctggcccattagtagttgtggcaatgccaggatggaagttacatttgattaacggggtaactaagaatctaacttcagaagaactcttgctatcccctttaaccctcacaacaacagcaacaaataaatcagttggcaaatcttgaagatgtagagccttactaacaaaatggagttaagaaaacccttcatgcaagcaaaaaagcttgatctctgctagggacatcaaaggtgcagtggtgtggacgtccagacacagatctgatgtaggctttcctcttgggccttagcctagctcagtggttttcaaattccactgtatgtgagcattgttgcacagggtggtataaacaaaaactgtatatagtgtccttgttgggcaatgtaagacacttttatttattgagccaatacttacagagtgccttctctgtgctaagactcataggtgctgcagtttgagcaaggatgaagagaagtcagttaatgggtgatacaaaaatacagttaaatagaaggagtaagttttaggattcaatagtacatatcacttgtacccccaaaatatgtacacctgtgatatatcagtaatgaataaataaggagcatcattctagcgcaggaaacaaaccaacaaggactttgtggtgtaacatcagctgtgatgaatgaagagaagaatcagaggggcgagggaagagggggcctgctcttttagacaaggcgaccagggagggacacatcacagcagagacctgaatgaagagaactcatttgccagaggagcattctaggtaggaccaggattgtgcctggatgtggaagggagtgtggaggccactatgctggagcagaacatagggaggagatgggcaggaaaaaagaggaggagggtttcacatagttggggtcagatcatgtagggccttctaagtcttgacatggaccaggactgtggtttttaccataaatgtaataggaagcattgaaaggtttgagtggaatggtattaggatctgatttgcaccttacaatttcaaggatacttttgaacccacacactctgcattgggtgggaactttagaccctagcccctgaattaagtgttattctactatatggcacatggagagcttttctgaaactacagttacttaataatgagaaattcaatttaaaaataaaacgcagatgctctgaagcccgttggtagaatctttggggcttttaaataagtttaaaagctacaagcttcaataaagattaaattagaaatcctatataaagcttctaagagtgtaactagcattttagtaatgcttactaagtgctggttctgtccctttctgctctcctattttttttatcagcgcctttgctattaggccaggcgcagtagctcacacctgtaatcccagcactttgggaggccgaggtgggaggatcacttgacgccagaagttcaaaaccagcctgggcaacatagtgcgattctgccttgataaaaaataaaaataggcagggtgtggtggctaacacttctaatcctagcactttgggaggctgaggcaggtggatcacttgaggccaggagtttgagacaaacctggccaacatggtgaaaccccatccctactaaaaatacaaaaattagctgggtgggtggtgggcacctgtaataccagctactcaggaggctgaggcaggagaatagtttgaacccaagaggccaaggttgcagtatgctgagatcatgccactgcactctaacgtgggtgacagaacgagaccctgtctcaaaaaaattaattaattaaaaatttttaaaaaatacaattaaaaaatacctttgctattgatgtctgtttctgattgtctgtcatcccggtacactatatttactttccagggaaactgagtcattcaacaagcctctggcttctagtgataagcactatcattagaaagaattatgttctgtgtgttaaggataagggacacattctttttggaaaatagtgcttgtgagtctaggaatagttgtataatctgggaatatatgctaatgctatagctgagttcaaatcacttttttaaaaatgcaaacttatcttctctgtcaccaagcatgtcttccatacaaaaggcacatttctgtagcttcatccatgttactctaggctatttcctctagtttattaaccacacgctcagcaaactgtagagagtatggtctgatccctttctcccataataaaaattttaagactatgtacttgttgatagatgacaccaacaggatatattttacagaaatgaaacaacaacatgtgaagaatattttaggtcactgtaaagttcctttaatagaaaaaaaactttagatttaactgttaaaccctttgaaaaagaaataatttatttcatgcaaatgactaaagcaaaatggagtgtgcagaagacctacctgcatactgtatgtaaaatacagttttctgggcttcactcccaggaattctgattcacaaatctggggttgggcagctttcaattttgagaagtgccccgagtaagctgatgtcaggaatgtgaattttaacaggcaccccaaaggaaggctgtgggaaaccacatttgagaaacactgccaaattaccaaaggaactttaactttgtgttatagaaatatcaaacacatttaacagacacttctcaaaagaagacatttatgcagccaaaagacacgtgaaaaaatgctcatcatcactggccatcagagaaatgcaaatcaaaaccacaatgagataccatctcacaccagttagaatggcaatcattaaaaagtcaggaaacaacaggtgctggagaggatgtggagaaataggaacacttttacactgttggtgggactgtaaactagttcaaccattgtggaagtcagtgtggcgattcctcagggatctagaactagaaataccatttgacccagccatcccattactgggtatatacccaaaggactataaatcatgctgcaataaagacacatgcacatgtatgtttatggcggcactattcacaatagcaaagacttggaaccaacccaaatgtccaacaatgatagactggattaagaaaatgtggcacatatacaccatggaatactatgcagccataaaaaatgatgagttcacgtcctttgtagggacatggatgaaattggaaatcatcattctcagtaaactatcacaaggacaaaaaaccaaacaccgcatgttctcactcatagatgggaattgaacaatgagaacacatggacacaggaaggggaacatcacactctggggactgttgtggggtggggggaggggggagggatagcattaggagatacacctaatgctagatgacgaggtaatgggtgcagcacaccagcatggcacatgtatacatatgtaactaacctgcacattgtgcacatgtaccctaaaacttaaagtataataataatataaaaacttaaaaaaaaaagaaatatcaaacacatttgaaagcagagaggtggtaaatgaacgcttttgccccaccaccccattcagcagcagagccaacatcgttttctctactccacctctgcacctggattattttgaagcaaattccaaataacagtattccctggaccttgcatcttcataacagattgctgttgactcaaaatatctataaaatattttactatttctataaatgattaggattcttcttctcatacacaactacaacatcatcatcacaccaaaaaatgcattaacagtcatttctcaatatcatcaaatatcccgtcagtattcatattttcctaattgacttattaataagttttattttatgttgtaggattttttaatagtttatttgaaccaagatccaaataaaggtcatttcggtctcctaaacctcttttacactactcggtatcacctatgtcttttttttattttgcagttttttctgttgagaaaccagaccatttgtctggtagaatttcccacccgtctgggtttggatgattgcctccatgtggtgttgctaagcatgtccctctgtctcctgaatttcttgggaattgctaggaagttctagaggcattgttttgtttgctttgctttgcctgactgcttcatagttggtgttgtgttgtgtatttccttcaggaggtaatggttggtggcatctctttttgcagtgagactgtcatctgaattcataaatttatcagggattgcaaatagtggtagtctaattctattattatttgttcatttgttagcaggaattattgttcatgaagagaaactccttgcatctgtaatttatctacccggtgcttcaggttttgtaggaaaagcaggataatatactagattctgtctatttaccaatttgcacgatacagctagttcacagtgtcaaaccaagtcactgtgttttgaaagcatgactgtaaattcatagattgcagcatatctgttgtgtttcagtccatgacagtgattaccctttttcatgttcagatggtcccctgtctgagcattgggatcctattcagtttggctactgagtccttttaatccaatactggctgtctttgatagttttcttgctttctagtataacactatgttccaggctcatcttgtacatttcttgccttagctctgggatcagcttttttccaaggagacctggtttctttcagtgagaaatgatatttggagaccaaagactgggccccaggggaactgttctcactgggttgaatattgtttttcctttccagtggacacagccagtgataggaaatctgtgtctctctagatatagatatagatcgattgtgtgtactttttttttttttttttgagacggagcctcgctctgtcgcccaggctggaatgcagtggcgcaatctcggctcactgcaagctccacctcccaggttcacgccattctcctgcctcagcctcccgagtagctgggactacaggcgcccgccaccacgcctggctaatcttttctgtttttagtagagacggggtttcactgtgttagccaggatggtctcgatctcctgaccttgtgatcggccctccttggcctcccaaagtgctgggattacaggcatgagccatcgtgcctggccgtgtgtacgtattttttaaggtaaaatacctcatgagtttatactgatgtgccacaaggcttttacttaacttcattcattttacatcagtattttctttctctcaaactgaaaatagcagttctcactcacaccaacacaatttactcatttactttctcccacactacacttgcaataatttccgaacaaaaatgccagtgacattgcaacaatatgcttactgaaaatgtttaaggttttttttattttgattgtttagttttgtattggtttttagtccactgggctagagatggacaattacattacaatatgttagggtcatttggaatagttacagtctgtgtgtttatgccaataactggatatacatttgagttcacttactttaatttgagacttcctaagaggcttttgaaaagtgattcttgttcaataattatataaaaatatttaaattttcctgaaacaaaacccacaaaacaaggtgaagtcgttgaagtctgtctttcatgcctgtctgctttattttctcctttttaccatttttaggcatatctttcatttttattataagcaatcatactatttaggtaggtttttttttttttttttttttttttgctccaatagatttatttatttatttagagacagggtctcactttgtcacccaggctggagtacagtggtacagtcttggctcactgcagccttgaactcttaggcttaagcaatccttctgcctcagccccccaagtagctgggactacaggtgtgccccaccatgcccgctattttttttgtttgtttgtttttccagaccaagccttgctctgtcacccgggctggagagcagtggcaccatcttggctcactgcagcctcaccctcctgggtttaagcaattctcgtgcctcagcctcctgagtagatgggattacaggtgtgcgccaccacgaccaggtaatttttggatttttggtagagacggggttttgccatgttggccaggctagtctcaagttcctggcctcaagtgatccacccgccttggcctcccaaagtgttgggattacaggtgtgagccaccatgcccagccttccagtaaaaatgtttagaataattccttaatatggtacccttcttatcccccaaacttttcttagctgttgtttattggtttccaactctgagtgattttgaaattcttagtaccctttctttcttattttcttctctggctataatttgatttaaggtaatatccttttactcccacttaacatctatgttagtgagattattttcgttcctttcatattcttcccgcgtgtttttttttaatcattatactatctatattgtcagggcacatagtcattatatcgttctggctatatgtaatattgtttccttgtaatcatctttcagtaacagacctacagctgattatgtgttaaatgctcacccagtctttgtatcagtgcctttccagccagactggttgcctgactcttctcccttgcagattactaagggtttctgcgaacaatattccttgggtccttgcatattcataacagattgttgttggctggaagatcattttggctgggtataagatccttggcttagttgtctttcctgagtgtcacgctactgacttttagcatgaagcctggctcttgaaaaatcgggtgacactctaattttctgtcccttataggtaactcagtcattttacctgagtgtccaaagaatttttttttgttttctttcctaggtcagtttttccaggtgcatggagtattctgtcaatatatagtttcaaatctttttctacttctagaatttgtgcttcagtcacgattttaagcatttgctgtttttattgcttttcttcttcaaaggctcttattacagtgttatgttgggttttctttgctcatgttccttttctgagtctttctcttgaattctatttctttcctcatttctttttgatgtttaacactttctcctttctattttttagcactcctcaaagattatctgttgtatgtattccctcttgtgttccttcttatttggtcttcatctagaaaatggattttcttttttcgttttcttcaaattctttcccacgttcttttgcctctctctatccaactatttcttttctccaatcacttcatttctgaatgtttttattgggattagtgttcctttatctcttcttactgcctcattttcttttagctcttttgaaatattaaagttttcatctgttttgggggcatgtctctgtggtaagaatgctactctgatttttcttcttataataactgtgcactgtatttgaccacaatcctattttgttactcatttttaagtggaatgagttttcttgtatttttagggataagggatgggccagaaaatattttctagtgtctaggccatagaactccgtcttctgttgtttccatggaataaaataaggcctatattttcttagcttcgtcttctctgcctcccttcacttggatctgccccctcccttcactttggctaaattattactgccatgttcgatttagattctgctctcaaaagtttcttctcaaggtgatttggtcgtggaaggaagcttagatttgttggtctcaagagtgccctggctccgtaacacctaagcacctcagaccttcccagggttccttgccctcaccccatgaattggattctgcaggaccccttgccaatgatgctgctgtgctcaaaatagctcaccaccctgctgaccgtgccgtaaggacctttggaagcttgggagcccgttgtgccaaaaccttcagatgcccactgcctctcctccaactttctcttgcacagatattgcttctgcctggctctgtcactataaatggttcggccacacccattcctgtcttcaggtttatggactacacagtaacctcattttgtcttgatgtggtccatgggtttttggctgtgtaattccaatttctctgtttttgttgttatcattgctattgttactggcagggaggaggagggcagggattctgaaaaatttttttaaactgtgctacctttgacactggtgccatcatcttccctgaattcccgctttaattttttcttttcttttcttttttttttttaagacagggtctcactctgtttcccaggttggagtgcagtggtgctattttggctcactgcaacctctggctcctgggttcaagcaatcatcccaccttagcctcccaagtagctgggactaaaggtgtatgtatgtattccctcttgtgttccttcttatttggtcttcatctagaaaatggttttttttttttcttttacttcaaattctttcccacgttcttttgcctctctctatccaactatttgttttctccaatcacttcatttctgaatgtttttattgggattagtgttcctttatctcttcttacttcctcattttcttttagctcttttgaaatatcaaagttttcatctgttttgggggcatgtctctgtggtaagaatgtgccaccacgcctggctaattttttgtatttttggtagagatggggttttgccatgttgcccaggctggagactcctgggttcaagcgatccacccatttagacctcccaaagtgctgggattacaggcatgagccaccgcacctggccccacttcaatttttttttttttttgagacgaagtcttgctcttgtcccccaggctggagtgcaatggcaccgtctcagctcactgcaacctccgcctcccgggttcaagtgattctcctgcctcagcctcccgagtagctgggattacaggtgcctaccatcacacccacctaatttttgtatttttggtaaagatggggtttcaccatgttgcccaggctggtctcgaacttccgacctcagatgatctgcccacttcagcctcccaaaagtgctgggattacaggcgtgagccactgtgcctggccccactttaattttttaatagtgcttgagaagatgtttctgctaaatactatgcctctggattaaacctcaaatacttcaaaatgaaaagtttgatttcggtcacagatttttagtaaatactttttagggacaagaaaactacaaagtgctttgaaaaacaaaacaagctcaattttttatttgtttaacatatgtagaaaataaaattaatacacgtatcttttccaaattaacacagtatgaaaccaaccactactaattcatcaaaagacacaatttagatcaagtttaggcttggttaggacgctggacgctgagtaaatggtagctctgaggctgaaaaaaaacccctgagtcactctggtacacattctgatgtcagcatccccaccccaccccaacccttattcccgccccgcccccggccccgccccccccccccccccccccccgcgaaaagaagtctctagctctgaaaattggcttgttataactttacaaatgtagttgccaaattgccattgacatcacatttttctttttggcttttagtagctagatagtaatactataaaggaactctctgctttttctattttgtcctttttaaattcttggaggcccttcataacatggaacacaggatgggcaaacgtgcttcttatagtgtaggttagatttagcaccttttgacaaagggccttgtttcctgtgcagtttaaatttagatccactgagaatctgagaaattcagtaatgaaagggtaactttggagtttcctcttttggaagctttccttattaaattctattaatgactctgttagacttgattcccatcttacacaagagattccagaatagcaacttgaattgcttcttagtccctcttacgaagtcactccttcatttggcattgatcgagtacctcccgtgtactggctgacggggcttatatacagagccactaccttatttttcattctgttattttaagagtttcttgatagtccatctacttaagaagtgttgctattaaatttcagtctatctcataaatattattctgagatcctcctggctggatttataggtataaatcattcttggataaaatatacaatataaacagtaagtggaccagttatctgattatacgtgctctgagtctacagaaagacaatatcttggtatgtttcaggagacttgtagagatgaggtgtaggacttctcatttctaattaaaactaattaaaatttactgtctacaagggagatggattgaacatcacctttacctttctcttgacagcaatgaaacctgactcaaagctggcactaaatgtattatttcagtatctgtgtcctattatgtgttgtaatattttggattaaaaaatggagaaaaaataaacaagaaatttttatttctgctaaaaagtcaacagagtccattgttatctttctttgcttttcagatggcagaaattgggtgtcaggtcctataacacaggggttcccaacccctgggccatggaccattatgggtctgtggcctgttaggaactgggtggcacaccagtaggtgagaggcaggcgagccggcattagccagctcagccagcctaagctccacctcctgtcagatcagtggcagcattagattctttctcataggaaagtgaaccgtactgtgaactgcacatgtgagggatctaggttgtaccttccttatgagaatctaatgcctgatccccctacccctagcctcatggaccagtgccaaaaagtttggggaccactgccataagaagtcccgaccagaagtgtcacatctttctattgcatgatgctgcttcttgaacacccatagtagccaaggccagaattagtgtggcaccctcttccccagacaaggtccatggacagtgcatttcaaaatacaggaagctctccttacactctctgctacctagcttccatggttatcaagtaattatactttatgctgagccaacttatgcatttaggaagagatgaagagaaattatatcctcaaatgggctggaacaaaagggaataccaataatttgtaagttaatcaaattataattaaagcaggaagagacacaaggagcttggattatctatgttttctgttagaaaataatacaacaaaagtatccagggagtcttatcagttctgtaggaatttggcagaacagtaaggttataagttgtccttttaattcccagccacctctggcctctgcttaccatggccctgccttctgacttgctgtttgctcagctccttagtgcatgggaagagcagaaacatcaggggaagagcgctgagatctgctgtgcacctgtgccgcacagcccttcccatgtagacatgtgtagcttttgggtttgccagtggatggaacttatccgcatcaagtagccttccacgggggtggtgctgatacgcactcccacccacagccgatacagcctaatcacaagtggaacaatcagagtggaaagtagcggaaagtagcagcctctggtttccaaatgtgagagagcctcagggctcagtcctcaaacctggtctgttttttgttgatgccttcaaaccatctcaaaactgacaccttctccagcctgggccttttctttgaacctcaggcttgcatatcccactgtctcttaactgccttcagtgggatgaactcttgatattctaccccaacctgcttctcccactgccttcccatctccttccagttactcaggccacagttgttgacgttgtccttgatgcctctttttctcctacacaattctgctggtccacggtgccaccatctcttggctggagttcatcagtaacctcctgagtagtctctctgcttcttctcagaatatctcctccatgcaacagccagcatgaactggtgaaaatgtagtccagaccctgtacctcctctgatcaaaaccctccagtgcctctcagctcactcagagtaaggacctcagactttattgtggctcaaagaacttgtcacccccaccctctgacttcatttcctgctccccaccccctttactcagtgccaggaacaccacctcgatggtgttcctccaacacaccacacaggagcccaccccaggaccttggtaccttctgttctttctgtcaggaaggctcttcccccagtcaccacattgctttctatttccctttcttcaggcttttccccaaaagttactgtctctgtgaggtcttttttgactgacaagcttgaaaaaatggtcaccagaccaccaccctagcccccttttctgcttaactttttagcatctatcaccatttaatggaaaatacttcattataaatcttttatttccatgaggataggtaattatttgttgttgggggtgtctttgtcagcatctagtacagtgcctggcagatggatgctcaataaatattgatttaatgggttatgagggtgttaatataaaattagcatttattcagcaactactatgagtcagccactgggctaagtggcttacatgttaagaacctcacagaaggccaggtgtggtggctcacgcctgtaatcccagcactttgggaggctgaagcaggcagatcacctgaggtcaggagtttgagtccaggctggccaacgtggtgaaaccccatctctactaaaaatacaaaaattagccagttgtggtggcaggcgcctgtagtcccagccactcaggaggctaaggcaggagaatagctggaacccgggaggtggagattgcagtgagccaagattgcaccactgcactccagcctgggtgacagagtgagactctgtctccaaaaaaaaaagaaaaagaaaaagaacctcacagcaacctagtaggtgagcactgttactcttgttttacaggtgagaaaattgagccctagagaaataaagtaacttgcttcaggtctcatggttaaggggaacctgggccctaacagtccacttcctgtaccttcaaccacggctctaccgcctccgctaggagatggcccgaggacattccttagctggcttcagcttgctctttttcccctgcggtccacccctgtctcctgcttggtcatcagtgatttccatgccatcccatgtcattggaccagttgtgtgtttttaataggagttctcatctcactttctccacagctttgccaattctgctctccccctcctgtctaaataccttcctcccttggcttcctgaacaccactgtcttcgggtgccatcatccctttctggcccctccttcctaagtcttcaggtgttccctttctacctgctttctacgcctctaagtgttggagttcctcatggcttagtctctagaccactttgcttctccacttaagtgttctgctagatgatctcatccaaactcacagtgccttgatggatccatgactcctgcatccatgtttctaggccagacctctcatcatcttcgggcctgtgtctccagctacctactctgcacctcctttggggtatcacaatgtcacctgaactcagcacgttcaaagtcaaagttataacaatcaccatcccaccaaacctcatctacccaagaattccccatctcagccattggcatcatctagttacccaagacagatgcctaaaagtcctccttgaagcatttctgtccctcttcctctgcatctaatgtgtcaccaagtcctactgatgcaatctcctcagtgtctttcgaatgcactctctctcttccggcccactatcaccattctagtcctaaaacctaccttctttctaggagccacagcttctctggagtttttacacctcttccaactgttcccatcaccccgttcttttctttgacaacattttttacatataaaaataggtatttatgtgattatatcatgaatgtcttttctccccaactaagaagcactatgagagcagggagcttcctgtttctccccgttcaatcctcagctcctagcagcacagtgcctggtgtatagcagattctccatcagtatttgatttgttgagtgaaaaacttagatgtattaaatgacaaactgagatcaagggagaatgaagaatcaatcagaagcagatagaaaattatgctgtgtggtatggcaacatcatgaatggactgttaccgataatacacactgagtcatcaaagaaacattaacatgtattctctattttaaaagggaggtacataaatatagaaccaaataaacagatctcaggaacatttccattcagtaagcaaagttttagaagggaaagagaaattaagttcacatcatttcccaataacacagatgaatgttttccatccaattctgaggacaaagatagcacctcctcgcccatccatgccaacggaggctgaggtagcacagataattgaaattacagtgaagaaggaaaggggttgattgatttgcatgccatctcttttctttaatagtggaggaattgccaaaaaaggctaaaaatgggcaacaggaaaagggagaaacagtaagaatcttggataatcttccactagataattaagacttaactgggtctgttttgatgtgtgcacatgtttctgtacatggagaaggatgaacccacaaatattataaatgccaatttccgaaggcttttggaaaatgtaacccatagcatatggtgtcaaattaatttggggttttacttgtttcagtctgatttgggcacattgaattatgagataatagtttggcatccatgtttgctgagtgcttgttgtaagtttctcaatttcacaaaaattctctgaggttagaggacgcgtcgtgaccctcgtttggcaggtgaggaggtagcggcacagagccgatccgtggctcgcctgagctccggcaggaactcctgggcggagctgctgagacccaggtctgcagactgtcactctggcttcactatttctggccttcctttgagcacttttcttacttttgttctgtttcatgcacttaatgcacctgtttcatcatgctgcctgtcacagttaaaggaatttaaaacagaatggatcgtatttgacagtaaggagctgtacagctgaattccatcaagacaatgtgcttgtagccccaacggcattaaaactttcaaatgatgctttatcacaacttcctctgggctgcacgtgacaaaggggtgcttaaccaggagggacatctctctttgcttgtaggggcaggttgctgttttttgcccacctctaaaatctccttggagcactcagttcttcttatcctccttaaagccaacaactataaaatttaatttaatgttgaacagctgtttctgttgcggtccaggtgaaatttgaggtatcagctaattgtgctaaagttcccaaaaagaagtattcagaaggtgtggatcaccaattacctcttggcagagctgtgaactaataactagtagcagtagataatgtactcagatgccacatgaaatgcaaaagattctatgctttattccataaagcatggctataggacattgtctactatgtaactaatatttaaatatttatagatttttaaaagatttcttcaaccttcttttctcaccctgtttctagatctgatgcacaaaggaaaataataatacaaaacccataacctattcattgtattgttgcggtagatcgagctacatgctgcacagcaaaagaccttctttgcacttctttcaagcagaattattgctgtatattcactctgaactgagaggtgaggattgaactgtgtagtgcctcagaaaatatcaagagttttaaaacattagttttgagagattgaaatacatagaaacttggaatgtttgaatgtcagcccagacattggcaggcttccatgcagatttcattgtgagtaaaatgtgtactcagtggctgggttcaagcccttcatagtttataagcaaatgtctctgcttcttctagatcattgcaaaaaaaaaaaagaagaagaagaagagaagaaaagaaaaaagaaataggttaagcaaattttgtggtggtgcttatgtgtgcacagacatgcatgaggcctccgcatcttccaaacttggaaagcatattttaacagcacaaatatatctacatgtttgatctacatcagagcctctttttttccctcttccttgcatgcttttaaattatatagtttaaatgttttaactattaaatctgtttggtcttcaagctgtaaacatcacacacagctaataagctttaggaaagaaaaggaaattgacatttagtatagaggttctacaaaaccaatgaaaaccatgcaaatgagctatggaacagagagatttgcatatcctcgttgatttcatgatgatattctcagcatgagcctggcagccttgcctttttacctcttgggatgatgcatgtactggtggtagagccctgcagggtcaatttaacgagtgtaacattgtgattttccatgcggtttctcagaaccactgagcaaaatgcagcaataaccagtgacagaggaaatcgatttttgaagtaaatacttttggaggaggggaagaaggtacattcccttcatatttaatgttgccaaagtaggttgaacaagtttttatattagtaccatttggtatttcaaaataaatagattatccaccatttccatcactctctggataccctcacatgtttaccaccaaaactcctgcgcagagactggtcctcttttgcaaactgcctttggctcccccgcgatctctcatcagaaaagcaggctaaggaatctgcttttgcccccatcctgttagaatgataaatagtagcctgatggccaagttgtatatttatttaatacatcgtctgtattgatagtttatgatgtcctggatatgaatacacgaaagcacagttgcatagtggcgaagaaggattttgatatcgtggagatctggatttgaactcaactctggcagttctccctgccttagtttcttgcccgtaaatgggggtgatgaggtagttgtgagaattaaatgagagactatgcaaattgttataatactccctggaaaatagttaaatacccaatagatagcatcactattttgaaatgctttcaaaattatactcgagttttacttctgcaaaatcaaggcagctttcttcagaaaagagagaaatgaacttcacccctaaaatgtacttggagaattttagagggtcttttccaagttgttataaagcacttctgaagtgaatttgcccatttctgcccacaccaatcttataacattccaggaataaaatctgcactcgagtttaaaaataaaacgggtggaacaaactgaattagaagtccttggcagacatcccccccagcagaatgttctctcaattggtggtattgcaataaaagagatgtatattttttagtctgctcttcctccctgataatttcagccagttgtatttctctattctaaaaacctggtatgcttggatttaatctcaccactcctatctacgctcctgctcctacccccacacccatttcccccaaaaaaaccccacatctgcacagaccctccttcccaagaaaacatggaggcgggctgctctctgataccgtacatgtgcattccggactgtgctgaggaaggtcatagaaacatgagagggctctgctgttgtcagttgtaaagactgccaagaaagaacaacaaaaaaatctcaaatgcattcacatttctcccgcctcttttttcttctgtaaatattcaaccctttttagagaggcttttgataatgtgttatctcagcaaacaccacgaaccttggatgtacgcagtactccctaatcccataggaatgactcagtcaagagagttagatgaaatatggttggcaagattgggtggggaatcttgttactacacacacatacacacacacacacacgcgcacacacacacacacaccagcagcaccagccactgcacccctatcatcgccatagacattatgtaaaaactagacattctcctctcccttacacagtcagttgcatctttcccaaaaatggaaggggaaaaagctttctttggctgagccatatgcaaaaaatcatggaacatctgtgtaagtaacaacatacaacaagacaaattattggtggtaaaaggcaaagcccttgtttcaaaaacatgtctggaaatagtgtgtatacagaaccttcctttgtgctaattactcataataactgtcagctttgtgtaccacaggctgggctgttaataactagtggtcgcagtacggtgttctttttctttccctttctttttttttttttcctatccttccttccctctttcctgccttcttttcattgttgttgcacaaatcatatagccttattccaatagttgctggaagaccaaatcagagatgtgggggattcagggactcgcgacatcttggagtatactagtggataaatgccacttcacccctgatgtggccgtttccctccaacacttgtctaaggagtgcagggactttggggtccaagcaatgtatcagtaaacttcagaatttttttcctaacatttaactctattctcagtctcaacacccgccacaaaaataatgtcactccaggcaaatttagtcgcttacggattctgagtcttattgtgattttgcctgagtggcaagcttttcaggcacgtgtacttaaaaatgtgatgtggtagaatttgcctccagctaggaatccacagacttgggtttgagctccacgtcccacagtcaccacgtgatcttcagaaaagaatcactgaactgcctgtgcctccatgcccccgtttgtcaagagggaggtggtaatacctgctgcggtttttatgtggatcgaatgggcctaaaactcatagaaacacagaatgcttctatgataagagaaaactccagccaggctcagtggctcacacctgtaatctcagcattttgggaggccgagatgggtggatcacctgaggccaggagtttgagaccagcctggccaacatggcaaaaccctatctctactaaaaatacaaaaattagccaggcgtggtggtgggcacctgtaatcccagctacttgggaggctaaggcatgagaatcacttgaacctgggaggcggaggttgcagtcagctgagatcgtaccactgcactccagcctggaggagactctttctcaaaaaaaaaaaaaaaaaacgaacaaaaaatactctgatgctattgctactggttgtttttttttttaatgctaaaaggactccaaacatcctgttatcacccactgtcaaatttctgcatatattttgcagtgccagtgagaaacttggggtctctacagtcagtaaggaaaaaggagtttgaaagaactaagggatctctgtctatggggaagaaatagtagggcagagaatttaaatttagggttcttaggaaatgatgcaccagggccaccgcacagccctcatgtctcctctcttcagtgtcctctctgcctccatcacctagtgaggagggaacaggtgcaggaacaggtcgccagggtgtccagcaggtgacctcccacccccctaccctcgccgcccccactgctccactggcagcctatgtcccaaccaaaccttacttcacattgtaattctaatgttctgtgcgtgttcatcgccatatttccctccatctgacccagcccgtcaaaatccttcctctacttcagggcccagctcccatcccctcttccgcaaagccttctaaccgcaaacccattaacctctccccacttggggcttctgagtccctttattatttatggttaggagaaagcatcacgtcggtctggtgatgtgtagtgagttgtgtgaatgtgttagcagagcagggtggccctgcatgtgatggttgggtgttagctggagtgagccagcctgggttcaaatctccctctggcatcagcttgtgctgtaattggggtaagtgctgaaactctccctgtctcctttcctcatttgcaaacttggcttaataatgatagctacctcaaaaagttgttgtgataattaaatgaatgtcaagctcttggaacagtgcaagcgcttaagaaatattatgttggtgcaaaagtaattgtgattttgccattactttcaatggcaaaaaccacaattacttttgcaccaacccagtatttgctattactagtcctggtcagctgagcatggtggctcatgtctataatctcaacactttgggaggccgaggcaggtggatcgcctgaggtcaggagtttgagaccagcctggccaacatggtgaaaccccgtcgcaactaaaaacacaaaaatgtgctgggcatggtggtgagcgcctgtaatccctactactccagaggctgaggcaggagaatcacttgaacctgggagccagaggttgcagtgagccgagattgccccattgcactccagcctgggtgacaagagcaaaactacatctcagaaaaaaaaaaaaaaaggcctggtctaccagagacaagaggccatgtcttgtccatgaaagccttgcaaccatattttacagatagaaaagacccagtccatgaacattaaagtcagtatcaggtacatttatcaacataaaatctgttcctttgaatcagctcaataataaaagagtgcagctgagcaccccctcccacagccccatgcctctagtcactgaaaatctgtgaggaatttttatagagtgtttcagaacagagcatttcaagacaaccctagagccctatggaatacattttcaatcatctttctgcgtctgctttcttttttgggtgcacacagcagacactggtgatgaggcatgtgcctgtgtgcactgttgttttatagaagctgaatgaaagcctgggagttgtatctgcctgaaaacttccatcctggcttctagagctcaacacctgaaacgctggaggcagttgaggtcactttgaaaacggaacccttgatgttctgctcaaactttagaggcatttacaacaaatcaggcaaatgaaagtgtggaaaaatcagaaacgaggaccactctgtcttagggattttgtcattgtatcgtgtgtgtgtttatgaatgtgagtgtgtgtcacatgtgagtgcatttaaccttcatgcaataagagagtagttttccacttagaaccagccaactctctataaaatttacctccgtgattctaattttgctccctccgccgtgggcaagttggcaatgtctgaatgtctgaagtcatttttgcttgtcacgactggggaggagctaccagcatctagtgagtagaagtgaggaatgctgctaaacatcctgcaacacacaggacagcccccaccacaaagaatcatccagcacaagatgtcaacagtgccaaggctgagaaaccctggtttaccttaaccttaaaagaacaattcgaatgcttgggaagggatgtctgccacatctgtactggagagaagcatggcccccagtcaaggacatggagagttccatgtctggatctagaccgtgtccatccacaaagatgcctcctgctcttctccgacatacaatctggtccatgagaatagactttattggtgagggggcggggctttaggtgagcggcattgaagggcttgttctgagcttggcctctgctggcagattattttctggccactttaatctcgatcctgcctctacttggtctttttttttttttctttcccccagtttttggatcttatagttccacaggacaagatacatctaagagatgggggaaaaggttaaagcagcaaggggatgctggatagagggggagggaaacaagaaaggaaaaaacaagacagagagacagagatagacagagatgtacaaatgggggctgcttggttaaagtgtcctggagttttcagcaagagattttgctgccagtgtctctccatccttctctctgcctctctctctctctctcacacacacacacatacagacacacacacacacacactcggccccaccaccacacacaggccaggtggctctgcttacatacatggcttggcgcttttactccttggctaagaccatttcacacatgaacaacacagcctcctcctagagatttgtcatccatctgcttgcagaagagctgtctgtttccctctgaaaattggtccaatcaacattttcctttggccagggtagcttaccagcagctcctccataaggtccataattgcaatttctcattctcatttgcctggctggcttcacccttctgtcctctctgcaccttcccacaagtgccccaccctccccaccagccctctcctccttttgtgttaataagccctgtcaaaatgaatgacagaatcaacttccttctcccaaaatggctcattactcataaatttcaagcaatattgccttctgtcctcaaaaggtttgcagatttttttcccccaactgatcccctttccagagtgaaatagcggatgaatgccttgcctagcaccctctctaagctctgcctctgtggcagtattgtgggccaatatgccaacgagtctttccttgtgatctgctccagcctgtcttgtgccatatgcttgtggcagacagtggttaatatcagtctgtgagcatcttgaggctagctttgaagtctaattctaatgtcatcatgcttatagggtgcacactttgtttgttctggaacagagggtcatctgctacgggatgtggaacactgaccctgatattgcagccgtgtttgtggttgagtgagggagcaggtgatgggcataggagggaaccaagccctgagccgtgtttcagggatgctcggtcccatcccctttctcccagatgacttcttattcttaaattttgaatagtgagtaacacaagcaggaggtgggatagcatgagaacttaggaaatcttcccatctctttgttacttacaagataaatgtctatactgaagctttagggacccagattacaactgaattgttttataaatgcgtctgaaatctgctgttttgaaggacaaagtaatacctgaagaatgattaagaaggcttagagaatccgcaggctccaaggtgtgtgaataatacctttccatggttcactaccaggtgatctggacctacagccagtcttctgtgtttcagtatattatgttgggagcattcccagacagttaatgcgtaaaatgctattcaaattctcctttaccgaaaggcattttaaagtaatacacgtgggtgaggaatacaagtgcctggtgggatacttttggtaaacaacgtggcacagtgggatggagtagggtctactttttcccaaatgtgaagttagtagctacagaggggtcctgagacagaaagcatttgtaaatattaatttgtgctctgtttcacagaatctgaaatcaggcatctgtgcactttaaaatatgaaagaactaagagatctagtgtttggtagcattttagagggaaaaaaggccatagctcaaatattgctctgatttcagttggctgaatttatgtgtaaagggcatgttagggaatagtctgcaaaggtaccagaaactgccattcatggaaggccctgagtgcaaaatgcagcagtcagtagttctgacccatgccattagatggttctggaaggtcctcagaggagacgcaacaccaacagtgacactgcttccagctcaggcaggctggagctgttctgagtcttcctgaaggttctgaatggtccagcccttggactcccttcagagagtcatggagcacccacatttcctttgcacctgaaacacttctttgtttctgtcttcaccctgactcctcatctattcagagatcccagctgatcctctctttcaaagccaggccagtgagctcttacagaagcttacttcagcattccttccaccgtcttctgagtagcagggcagacagagacagcaatggagaattccagttgattccccataaaatggccactttgttgtggggcatgagctggtctgtacttgtttgtgcctggcagtgcacacactagaaccctgggcaaccctggatgtaaatcaactagatactattattaaatagccgaaggtttgccagtgcagcctggagcaaagagagaggggtaaaatcaggctcccaacagacttccccataggaaacctctcctctgctgtgattttccagatgagctgcgtaaatggctccaaatcaccgaatgtttgtgcacgcaggctccattcatgcgcatgcacacacccggcttgtgtccttcttccctctcgtcccttgaacccgtagctcttgattctgcctgtaggagcaatgatgttgtagcaaccatgacaaaagaaacaaaatcagaaggcagatccaggccgctccctgccacctgccctctgtctaccttagacagatcacttaggcccactgggtcttgataagacatggtcttttcacacctgttcttccagtcttataggattacctggaggatcatgtgatgcgaaggatgtaaaagtgctccaaggggttaaaaggactttatataataaattcctacaaactgctataggcacagccatagctctgaaactagcattctcgtaaggctagtccaatccataagtttcgtttgcttcaagcagctcagatagacactctctgaagataaatgatgcataaaaacaccattgtttgtgatcagaataatcaggtaccactaaatagtcctgcatgtgtatgcatgataccagcagcctccaacttgcttctccaggagcactgtacttaacttggaaacccctttatttaatttctgtccactcacaaagcttcaccttgtcttctctcctctctgtcctcccgaggttaatccttgagagcctgtaatcaaggctaggccctgcccaccttaagtcaccctcccctctctctaggcctccacctcactggggagcgtcattgcagccagtggcaagaagctgcaaaattctctcatctgtgaagagagcccctaaaaccccaaatcccggaccagtagaggaaaccattgctgccctaatatcacatgttacaagtcttcgagcccatggtatctgagatgttaggagctagcattccttgtaattaaacccctggaacatcacaaggacccagttcagggggcttggttggttgactgattgatgacagcatctcaattatgtaggagatttctgtaaagaggagtgactggaaggaaaagaagataaccttcatttatatcatgagaccttgcgtagtagaaggccgtgaggatgggaacaaagtgaaatcatgaaaaacagcctgatgcaaaatgacaaagaagaatttcagggtcgttgagatcacacttgaacaataactgaacagagccagcactacagttttcagacctgatggctaacaagtgaaatgtattcagagagaggtgtgtgattataaagactccccctacccctggtgctctattccactgactgtccctttatgaaaaatgaattctagagttccctttctgaaatttcttacctgaatcagatcagatatgacaattctattttttaaagcaccttactgaaaataaagtgcttttcagtagtaaacctttaagattcctggtttccctctgacttgtgaaaatatgaaagaactgaaattagaccacattggcccaggttgggaaaacagatggcagagataaggcagatcaaagaaacatctctctgtgggtgaaggagttcctggttgtcatgtatccattttttgtagcgttttccctacttgaggaggctgttgtgaagggcaggattcttcactgaatctttattgtaaaaggcataggtgtgtcttgggtggattccagttctcaggttgatttgcttgacaactcttaggaaggaacaattaatactgctgcccctcaactagctagggagatttcactgtggaggtagaagtcggattcactgaggcagaattgccagggcttgagacccttcatgcctctcttttccaagtctctctctccaagaaagggtgaacttttcaagtcaaagagcagggacgtaaataaatgcagttatggctgtcttaggaggatccattcacttaaggcaaaggtcttagaagttacagaagaggagagagaatgggaactactgtggcaccaggatgtctggagaagagaaagtgcgcttactgtgcacagcttcctctccctcacctgcgccacggtgaacccacctatatctttctgctggcaaaaacatttgctcagtgtgtcgccggagtacttgagtgtctgatatttctcaaggcagaatctacctcactgtctctgaaacctcaaaatatgtggccctctcgaaggataacagttggcagcaacctaaggctgttctgctccaacttggaatgaagaggaatatgatttggccattcttcttagcacagaggcaaataaaaaaaaaaacccttatatacttcaaaagatgaagatcttacttcttactggctatctttgcaccaggtcctgggattggcatataataaaaaatgcatatgcagtggccatgaaatgggcttaaaggtcaatcttggctgccagtcgtggctaaactgcattgtattccatgtttttttccatattgcccctgcagtgtacatatacatgcacagtcatggcccctgcacactgtgtacacactcacgcctgcacacatgtatgcatatcaacgcctgcacatgtacttgtatgcacactcacccacacatgtgcatttgtgtgcactcacttctgcacacctatttgcatgcacgctcatctcccacaaatatgtatgcatgcacactcacgccccccccaccctcccgtgtgaaactctgcacctgcttgtctttaccctcacccttgaacctgtgtataacctcataaagtaggaagaagcccagtgttgaactctacagccttttacattcaaaatggttttgaaaaatgcccattcagaggaacaggaaagcaccaaacctaaaaggtctgaggacctttccatgctttctgtctcctaatctcagagctgtaccaatctgttatttaaaaattagtcattatttatccaaggcaggaggggacaaatgtaactgttagttcagtaaatgatttcattcttttttttttcctgtgtcctttctactgttaaagtgacgaaaatgacaccacggtttgatatgtggggttggtttcagtttgaataatctcatccttagctgcatgtgaactcatgtcttctcacactctattagataaaagcctaaaacaggaaggccagaaacaactgtttttaaaaagctcatgctaccctggcaacttaagttggaagaacctaataaataaatacaaagctgcccctctgtcctaatgtacttcttctgaattccagctgggcacctcatggtttcatgcctgaatcacaaaggcgagtgccagtacccagccagagcagttttcctaccataaaccagtaaatgtgtgtgtatcacatgtaagtcagggtcagatggggaaaatcaactacaaaaccgcagagacattatgcaaaattggattacgtacatgttttcagttttgtctcttagcagtttaagtctttaattaaaatacacacgagagagagagacagagagagagagagagaatctgtaactgttagattttataggccccggttatgagataatagccttccaagtaatttttatgggtcattctatctagtggcaacttagactataaagccatctcccagcttcccaaaagtaatgtctgttttctcactttctaataattacttcagatttgaaagtaaggagttgtcacagtgaatacaaattagagtcagcttcagggtattactaaatgtggattgttttgttccgagttttatccattttaggcagagtaacatgatcatttatatacatctgcctctatgcaggctgtgtagacatactcagaacaccagcttcacctcttcagtcttctaagacagtctttctaatactctatattgtctaatagctaagctattgttaaataaaaacacgcaaatgtttgcagttaggctcccccctccattctcaacctcttaagtgatacagacagtaaatgcattttgatgtttatttagaaagttggcatcctgggactgttcacaagatagctaatttgtctgaaggtccccagagacagtgaaagtcatcccaccatctctctagctgccctcataccggggaagtaaaatgcagcatagaacactgcagctcacgttatggagaacagtggtgctatggtgatttcctttctattcaaatcatttagtgaggatttacataatttgcattaacgtgtgactttcgatcacttatgctgcagcagagtattcgttgcctatgttctctaaggcaccagtgtggtggttcatgtgtccttgtataaaagattactgtcctccccatccccagtctttgtatctgtgcaccagaacaaaatgccctcggatcatggccacccaggccagagaatgaggacccacactttaaaaaccctgtagatgataggatgagcggtcctcatccgtcccctccctgagagtgaggttgggttggagtagaaggatggactctgccaaatgatgacagcagccctgagagtccttctcacaggtggccagctctgtcccctccagcctcaccacacattcccctagtacacaaaggcagacccgggcagccactcagcatgcacatgtagcagtgtcccctgtacactggtaccctcaaggcctccctggcacctttgcttgttacgttggctgatttcttcaaagggaaatatgggatgtggtgcagcctggccctcacacactctgaaaatagcactgcccagggccaggccttttcctttgcacactgccatacccaccctggaaagtactccatggttgtatcacaagaaaacagccatttgggcattttaaattactcaaaatattataaaaatatttataaaatatattaatgtatatatttataaaatacaaagagtatatgattaccaggcaaatgagtagacagtgatagaactatcataagaataggattggctattaattataataatgattggaatagataacatttattgaacatgtattatgtgccaagcactgtgctaaaatatttacatgcagcagttcatcaaaagctcatgggaagccatgtgcagtgtcatgcacctgtactcccagctacttgggtggctgaggcaggaggatcacttgagccccagagtttgagcctagcctaggcaacatagcaagaacccatctcaaagaagaaaacaatacaaaaagctcatgacagttgtaagacatatgtaccatcattacccttattcaacagaaaaggaaattggggcttagggtgggtggttaccttacttgtacaaagtcacacagctagtaagtggaggagttggttcaatgaaggataaccagggaagcatctgtgggcatatcgaggcctgaaaataggaacaccttggccaaatttcagaccatgacatcaagcgaatgcttgaaagctaaggaacaaatagaaatatgttgtatcatttataacaaattgttaccattaacacctacaattattagcgttaggagtattgcggtgggaattgaacaatgagaacacatggacacaggaaggggaacatcacactctggggactgttgtggggtggggggaggggggaggggggagggacagcattaggagatatacctaatgctaaatgacgagttaatgggtgcagcacaccagcatggcacatgtatacatatgcaactaacctgcacattgtgcacatgtaacctaaaacttaaagtataataataataaaataaaataaaaaaaaggagtattgcatggtcagactgttcagatctcatgaatgctccctgcttctctattccttctttgatttgacatgtgccaggccatgtattccagtggatttctgtactttctactttattccaaaggctaagcattcctgaaagccacagagggagttgatgtgcttaaggaaagaagtatcgcttaatgtggccaaaaaccgattccatttctgtacaaatgcaaggagtttttgccaggagccagggattaatagtctagaggaagggactaattgtacacaggaacaatatttacttttataatgggaatagtttgagacagtgcatcttctagacacaaacattcagtaggaagggttatgcattaattctttcatttaatgagcattttaagcacctattatgtgccaaatatcttttcgtagctctacaacagtgttcacttctcaatcttttgctacaccagagcgttgggaccatgctcccattaatcaccctgtctcaaacaacatgctttaccttcattcgttgatttactcatccattccttctcatagtttttaacctcaagagctctgaggttcagggtggaataatatggagggcctttgagaggctaacttttgaaccaaatcttcgaggatgaactagggtagtggcaggtagaaaactgcctttatatttagccttctttggtacctggtcatggatttcttcttcaagcatgaatggcatcagttgtctgggagtgagatacagtgttcgtatgctgagaaacagattaggccattaaaaaaaaagttgtggccacgtgtggtggctcacgcctatagtcccagcactttgggaggccgaggcagggggatcacgaggtcaggagatcgagaccatcctggctaatatggcgaaaccccgtctctagtaaatatacaaaaaattagccaggtatggtggtgggcgcctgtagtcctagctactcgggaggctgaggcaggacaatcgcttgaacctgggaggcggagcttgcagtgagccgagatcgtgccactgctctccagcctgggtgacagagcaagactccgtctcaagaaaaaaaaaaaataagaaacttgtaactccctctctctacttgatgaagtagacatcaggaaagactttcttattctgctttccattaaaagccataacttggaaattattattgattgggcttggtgtggtggcttgcgcctgtaatcccagtgacttgggaggctgaggcaggaggattgcctaaggtcagaagttaaagaccagcctgggcaacatagtgagaccctgtctcaaaagaaaatttttttttaagtagcctagcatggtgatgcatacctgtagtcccaggtactggggaagctgaggtgggagaatcacttgagcccagcagttcaaggctgcagtgatctatgattacaccactgccctccagcctcggcaacagagcaaaacctcatctctaaaaaataaataaaataatatcttaggggaagttgacaaaacattagaaatattgtagggttaggtgcctgttgagccccaggatttattccattattcactcatatcttcatgtatccattcaataaatacttattaaaagcctacaccatgcaagataaaagccacattctactgagtatgcaatgatacacggtatggggtttctgctttatggaaactaaaggcctactagaggaattcaggaattccagtgtgtaccagctcggctgtaacacagtgaggaagagataggaaccatgaactaagcggtgaaaatgtgatgggattcagaggggtcagaggtattggatacagtgagattattttaaacgtttagggtgtacgagcaagatgagtaggagatttctttaggaaacatctccctatgaaataaaagtttatataaaaggaataataattacagttgatatttatgaatacttaatctgggccagggactatacttagtacttttcatgcattgtctgattaggtcctcacaacagccctgtaaggcaggtattgtactttcttatattttatagtttgcactattgtgtgctccatggttatagcaaaagctttgtctgtaaaaggccacagggatagaaggcagagaggaaagtagatgtgtgatgcagtattaattattgagccaataaaatctctctaatttagattttttaggaggaagtcattttacattttacattaatttaatctatattgagagatccttctaagaaaataagttgcattacttcaagtatacatagccatataaattattgaccaattttttttttccaattcatagacattactttccagaaactagataatgaccatttgttatcagcacactgactgcaaaatggatgatgaagaaagcctgggttttttttttttttttttgaaagcttggtagttcttcttgtgaataaattaaacactttcctgacgatcctgtttgcattattgacttatatgtactggctcatatgtagctgcccatgtataattctccccactcattctgaagggagggaaaaaaacgattaaaaatttcccctccttctttttcctgttttgagattatttttgctcccagcagaggcgcggaggagggagctctcagagccccattctgttccctacctacagcatgaaggatccagataaccgcagaatgaatgaggtttgagcatttgtttttgctataagtaagatggtttcccattaataaaagtggcactcagtttactttgtcttcgccagacaggcaaagggtaaattaaggtggttacctgtggtgtcccagctctttcccaaggctggactagtgtgagccgagaaccaggcaggactcactcacaggtccctttctctgctacttctgctctggttttatgcgaagccctatttcccagctgcttcgggtaaacaaggacttctgtgttgaaataataaccacttgggctgggcgcggtggctcacgcctgtaatcccagcactttgggaggccaaggagggtggagcatctgaggtcaggagttcgagaccatcctggccaacatggccaaaccccatctctcctaaaaatacaaaaaattagccgggcatggtggcaggtgccgtagttccagctactcgggaggctgaggcaggagaatctcttgaacccaggaggcagaggttgcagtgagccgagatcgcaccatttcactccagtctgggcgacagagtgagaccctgtctcaaaaaaaccaaaaacaaacaaacaaaaaaaccacttattgtttcactgcctaatattaattaattggccaaatttctattttattatattccatatattttaaaataatttcttcttctgttgtacaaaccaagatagaagataatttgcccaagaacacaattggtaggtatcctagctaggaaagtgggtgcttctgaaaattataaaaatgaaatgaggtaattttctgggcccttggtacaatgcctgagatgtcatatatactcagctaattataagtgacattttgttctagaatccagtagctcaacttttagtccattgtgctgaacacaaatctatagatccttaaattgtatacttttattaatttaattttaaagagccagaaaaattgactacattggaaacattccagtccaccaacatattgagtagaaagaaggacaaaggccatattctctttcagatgctacaaattgtgtatattttcagtaagctgtgtctgcttaaggaggcattactgcattcggatagataaactcaaataaaaaggcctgagtgaagaggctctactgggtttagcgtttttttgttgttgttgttcagttttgcatgtgtgtttttaaatcagtttatggttcataagctgatgaagcagtgagtacaagtttgaactatgagaagcaggtttgaataagtctagacatttggttatcttctgtctagcattcatttgtgtcgtgggcgtcacactctggggattagtgtttcattatgcagaagctgttttatctttagctttcttataatagcttaaagtgaattctgagtggagagagaatgaaggccaggccttagtaactgcaagaatcataccaaaatgggttggatgggttttaacagtgaccgataagcattacgacctcactctctgatagttcagttggctcgatgctgtctcatcacctcatttagggtacaatatgctgaggaactgaccaaaggtccctgaacagtgagagatagggaagagcagaaatccgttcctgtaccaagtgtctaacacttaatataggtgagagctggcgtgagattatctgtgctgtggaaaaatgaggacctatcgatacctctaagtatataatcactgccgtgtcacattttaattagctccttgaggctatagaaagaagttcgcttcttatcctccaaattaagcatcacttttacaaacaatcaatgttccattttcaaaaccccaagtagagcaatgtttgattttccttactttccagctttgagaatgtttcatttttagaaatatgttataggaatgtaaagtaactcttgtttccccaaataaccacctccttattatctgttcccctaagctgaatcctttcaaaggaaattttgtcttcaggctaagtttagtggctgatggaaatcaaaattatatcaggtgggccattgcgtcagtaaaaaagcccagaccaccaccacacaggatttttctccagacacccaaacatcatgtcacaaagctcaaaaaagtagtgattaacatgcagtgctttcaggaggcccacattgccgattcagtcccagtatgggctcgtcagtttcactttcattcattcatttatttatttattcccccacccattgattcacattcactcatccattcattaaacatttgctgcacacaatatcactgttagacagactttcagaaatgattgggttcctgtattacagacatgagcccacggcacaaaggtcaaactaagagtaagatggatgtttatagcacaagcctataacaaaaagaatgggtcccgagccgcatcttcttccaaatgcacaaactatatttgtaccttaaaaaaaaaacaaaaacagtgtttccttttgagaggcagcatggtatatgggaagaacacggatttaagaactagacaggcctgggtttgaattctgcatccataatgtgctaactgtatcatttcgaggaagttcttttgagtttcagtttgtctttaaatagagtcatcatttctactttgtagggttgtgtgaggattaaatataaaatatgcagcataatgactggcacatttaaacgaagtgctcagcaagtgctatttcccttcccctttcttcatttctaacatagtttgggaatggtttaggatgactctttttcttcttgtgaatagatagagacctcatcaccctaacactagaaaactataggacagagaccatacttcttgctgtggccagccctcatccactttgatgatgcttgcagctcccaagagagacaacagcccccacggcatggccaagagaggagcaaactctctccccaaggcagtcactctggggatgccattgttccattgccaaactcatgacctttggggaatttggaaatctactactttgtggggagaaaaggacaaagaaagtcaagattaagctttatatgtaaaggccttttattttaatggtgttgaattgagtttggattttgcgtacccttcaaatttcttagggtgtgggtgagggcatcctaggagatttaattagctccttgagcggcactgaagtttgcgacattgaggcacattttcttctattgtccattgaagtgggggagcctggcaatgaaatttctgagaaactgacgctgttgccgtggatagaattgtatggatatttgaatttagtttagtcacttggtggagttttattttgttgtttggtttcttttggaaagagaaaattagtatagtatgaatctgagcagtctggttacatgctttaatgggcctctgagataaagcagaaaaggatgtagtctagtagtaaccctttagatgataagggacacgcaggaggctgtccaagacagtctgttaatcttaatagtctctcacttgttaagacctgatttatttcaaactaaatttcttgttttgagtttccgggtgaaagttctggactgaatccctaaaaacatgcacaacaaagaagaaggcttttagaaaggtttctcctattgacagggttcatattctatagttcacaattcagtgaatcaacatttatattaatttcatccgttacaacctcagaatttgcctacaagatccaatggcatttttactgcccttatttagcaagcctatacagtacttcatgcacttggtcatgtcttcaactaatatttattgggtgtcttccctaagcaagatagtgcgagagagagagctgagttaaaacattcaagataacctcaagaagctgacaatctactaagggagataagacatacatattaataagaacaacttaaacacaaaggacaagatgatatgtggcatatcttatcaattaaataatgttggacttcagagggtgaaggaattaggcatgaaggtatatctcaacagggctgtgaatgactggaaacaaggtcttctctcttcacactgtgagccagccacatccatactacggtgacattcatttctcccccaggccagctatgggcagaagtttaattatccttgaacgtcttcaatgatcctcatctttgcccttgttccctctttatcctttctttctccccaatgtcttaaatcctgatgcagccagggagattttttttttttaaccttcaagaaggtaaaaaactatgccagggcaaaatgccagatcaatgttgctattaatataatcagatataaactttttccagttggcaccaacaaccctgggccttctctgagtaccacctataaacagggcttcaatttcccatttttgcatacttactaatgtactacagatcttgcactgactttaattcaatatcaatattaaagtcatatgaggtagtagtaaatagagatagccataccttagagtcaataagacataaaattagttatgttattattattattaattatgcataatatgtcattttcctgaagagaacagactaatagctgatttcagcaagcatctttaggcttttgttttcaaattattttacatctttttcttttcttttcttttcttttttttttttttttttttgacacagaggtctcactctgtcacccaggctggagtgccgtggtgtgatctcagctcactgcaacctccgcctcccaggttcaagcaattctcctgcctcagcctcccaagtagctgaaactacaggcatgtgctactacacacggctaatttttgtatttttggtagagacgtggtttcagcatgttggccaggatggtctcaaactcctggcctcaagtgatccgcctgcattggcctcccaaagagctgggattacaggcgtgagccactgtgcctggccacccacctattttccatctttagcactggccgttctcattcaaaatacgtactgctacactaagaggagacttaacttcaaattcactttgctccacggatgttgtatatgacctgaatagatgtaattctgacaagcttgtagttcattggaggctcacaatttgaaagaaatgcatgattaagactttagaacataaagaagattctagtaaaacaaatgattgcacccttttggattttttgcatattatctttatgtagggaagggaatgatatgttagaaagaatcctcaaacaggtttagacaaatcactggttgaaccataatctccaaaatatcgctacatcagaaaaagcccaacatagcctctgaggtattcgtcagaaatcccagtgcaagcattaggaaagaaatgtactccctgctcctcacctttgtaagtcagatttagtcttcactgttcatttcaggttctctgcctccataggggtcccttcagcacttgtttggttctctaattggcttatgatagtgggtcttacatcatcaactggattgtaaattccttcagaaagagatgtcaattaagtacacagcagagtcacagtatttcaaaattggaagtcatagtaagggggaaggagggccgctagatgctgtgattcacacggcgtcatagtaagcaagaggccgaggcagtgccagcacccaggtagggctccggtgccaccctctgcttcatcctctgccaagcctatcacgacggtcgttcagctcatgctctccatgcacgtctggtgatttgatgctcatctttgccagcttcagagcatcactggacacatgcccagtcttgaagggttaattttcaagtaccaagcatgctttggacaaactcaaatctgttccttgttttcgctcaacccgcaaccagcatcatcagcccagacgcagcttccccagaaggccagcaggtggagcacagttttgtggaacttctctagaactcgctgtttaaaagccgcaaaccaagacatgtgaggctgtggggtggggggcaaagaagagccccagattctgcacgtctggaagcttttaaaattgtcttacaacaattttagacctacaaaagccagcttttgaaattgcataaacggcaagtcgagttcttttttttttttttttttgagacctagtcttactctattgcccaggctggaatgcagtggcacgatcttagctcactgtagcctccacctcccaggttcaagctattcccctgcctcagcctcccgagtagctgagactacaggcgtgagccaccacgccaggttaatttttgtatttttagtagagacagtgtttcactatgttggccaggctggtcttgaactcctgaccttaagtgatccacctgcctctgcctcccaaagtgctttgattagaggcatgagccacggtgcctggccagcaagtcaaatttttaattagacttaaaatgttggtgctcataacaactacagttactgtggttttttttttttagtttcataaagaggacagacgctaaggcaattgtgtggaacagagcagcttctcggggtaaccatctcctgctgatgtataaatatcggggcaaaactgagtaagttttagaaaataaatgtcaaagcaagtccgagtcatttattccttagcaggaaatatcgatcctgtgacattatttgattataatgactgtttctattaggttaaatgactgaggtatacttaaccagtttaggtgaagaatgaggctcattgcaccatttgattgactaaaccttagaacccatgtattctttttatttgttcagtcaccaatttttatgaagcacctactgtgtgccaaacaccctcttgggtgccaaggtaagaattaaattttggaattaagcaaagcatgatggctcatccatgtagtcccagctactcagcagactgagacaggaggatcgcttgaacccaggagattgaggctgcagtgagctaagaacatgccactaccctccagcctggatgacagagacctcaactctaaaaaacaggttttttaaaattggaattaaacacacttgggttcaagttctacttcagctacttattagttgtgagaaaataaatgtcaaatgtttttcaatttgcataagttatttaaccacattatccttactttccttatcattaaaaccctgaaaaggttgtaagtgacaaaatacgtgatacacacttagtgcctgtcagatgataggcctgagttactgttaacttttttttttttttttaccatcctcatcatgttcctcattctcatcttcttccagggttctcacttgatgaaggaaagtatttaagacaatacttctttaacatacttaataatggaatggatatagaaatgggagaaatcagtgtgaaagcaggctttggtgaggccactatttaaaataactatagtttatttaaaggagacacgaagtaactgagatttcacaaggccccagacccccttctcgaatgttattatcaactcccgtttctgccctgtgatgtcatgagggttgatgatcggttcttcttttattttgttgccaagtacagcagggatatgtgtcctctctattcctgagtggtgaaagttctcttctgagaccacaaaacatggtggcctcaggttctttatggccccacggtctcttcctgcacccctccccaaggggctgggttggtagatattcctaatgttatatcccctgttgttgacacccccatgcccccaatcccgcatgcctagcagatgcaccttaacccaaccactctgggtcagttccttcctcacacagcaagctgctaagaaggttgaagaattactggacttcagataccacatggcaccattatccctggcaggtttcctgtcactgcctgtttctttttcttccaggaggctcatcaaacaggcctccacacaaacagaacatccatccacttcacaggccacccagacgtatccagagatgcccagatgagacctgatttgcctgggttaaccgtgtgtctgcagctcagaccctccaatggggcttctagctacatagtctaatgatgaaaagctactggcctgggatttaagagcacagctttctagcctaactccacaactgtgcccctgggaattttagtctcctctctgcatttcaacttcaccaactaaataagtaccttttaatatctaattgaattgatatgctatataagcaaaccagatgttgtgagtaaaaccagcttcagcatccaaaagttgatacagatacttttgaggagcatgtttcaacatattccttaggacagccttactatgagaaggtcatctctcagtgatttcaatgtgccattggaagaagagcttctgccatttaaatgtccagttaggcactggtggacacagcagtatccttcccattcattccgaccatattattttgaatcataaaggcatatccttagaggagaacatttaaaaaatttaataatgtatttgtttcattaacatgaagttaagactttaagataagggtagtgcccacaacacaatcttttaaaatgaagccaagttaacagtcattactctgtgatctcaggcatgcccattatctctctgagctataacttcctcatggatgatcactagtctcctgccgctgtgaacttttacaaatctgattccatagtacacatcttaagtgttagaaatgcttgttctttggtgctgtaaagaaatagaccttgaacataaatttaatttcctcagcaagaccatttttactttctgcagaaagggtacacttgccagcagttttgccacaagagtacacggaacaaaggagacagggtcattataacctgacgcgtccaccctactgctatgtccagtttccattggctggaatgggacctcacattctgtatttgtcccgaatggctagcagcttagaactttttaaaagcagcaaaagcagaagagaacaaaggaaggaggaagtaacttgtgaaatgctgagaaaggtaaaaaaccttcaaataaggaagaggaacaggctatgacctaatgcttgcttggaccagtataagcatgctagggtaaatatttaggctaaattgtgggagctaagaacataaagtacattgatttctttattacagctagcagatatttaagaatgttagcacaggtctttgaataaattttgcttctaagagaaagtactattaattcctaattagatggggaggaaaatctttgaagaggaacctctactttactttttacattaaggaaatagggtgtctagtaatgccctcaaaagttatgaatgcccggtatccgttaggtttgaactaactgatcttcacattactttaaaaatagagatgactcaattattggttggctgtgagtaaaaccaaataaagctttatttaaagttttatttagattcttgaaaaaattatttaacttgggttctccttggtatgattaatttagagagaaaggaatctgagaatgctgttgacctcatcattccttcacatgttccacttttttagtctctcattttaacttaatgaaggaaagtcatagggagaaaaaagagagagaaaagaagataaggctgtgaagagagagggttgttttaagacctcacgttgaacaatcagctaaatctgcattgaaagcaagagaaatagctcaaacacaggtttatagtattttctttctgagagtgaacattgtgcagtaaaaggtccttcacatgctatggttcatacactggcatttcatgaagcagtagggagcagagttaaccccaccaagagcactgcagtgcggccttccttcccagcccccgttccagcacctctttccatttcccgacttttctttcaccgccagtaaatttaatgtcttcagctgagcactgatttcatgagcgtaaaggacattagcagtacttcgcacatggtatgcacaaatattaggcaagtccaaggacaggatgagctgcaagcagtctatgataagagtcaaaggcaggagttggggttgtagactcctccagccaaccacagcaaccaggaatttggatgcttcggccgccagagtgcttgcaagagttcatctctgaaatcgcttccattccagcgctaacattttatgaaacctgtgcttttcaaacagattgttttattgcttcctgcatcaccaatgtgttttctctttgctcccagctccctgagagcattttgaattatagcacagatcattgccatccacaaggtgcatgacatcacagtggacttgggggaagcaatgtcaaatgagactgagtggaatgggaaggagataggctggaaaatttaaataaaggtctttaggataaaatacagaatccagaatagttcctaactctcactacgtagtcgtttgtagcaaactgctaggactcttggcttttattggtgtgatatagatgcgctgctccttaatggtagagactgtgtctttaatcaaaagttggctacagagttgtttgtgcctgtgatatacttattagtccagagcagatatattttctgtcgtgtgtgctgaggagcactgatgtaaatccacttaatgttcatatcaaactctattctccaggaaaaggtgagggactgaaatgtacatacttgttggctggtcacatttgatattcagagacccaaatgagaaagtcttgcttctgagaaagtacccaaacaccaggacatcttccaagccccacacagtagcattaatgttttaggtgtgcaataaatagtgctgaatgaaggaagaaagtttcccaggctagaaacaggtgagtggagacgtgattattattaatacaaaatctggtgtgaggtgggggtgggaccctctccccaggctgtaccgacagccccttgctctcagtcggactcccaggctgagatccggccactaaagagggaacagtgacatttcacaggaaatgacccagaaaactaacaacgtggagtgtgtgtgcgtgtgtgcgcgcgcgcgagtgcgcgtgcatgtgcgtatggtgcacatgtggtgggggctggggacagcttgaatacaacccagggaccttaactggaggaaagactttaccaggcagactctggtaaaagtcgagcaggaagctgagcgtgacaggaaccccaagggtgtcaaaatgccccctcactcagcatctcttgagtcccatcaggacagaacttgtgcttagtcaggttctggacctgacagatgtgaaccagacgccctctcattgctgggggctctgggagggaaaggtgggatgaagagggcacattcctcccaaaggacaaagcaccttttagtggaaaatgtgaaaacaaaacatgctcagttcaaacaaggctcactttggtccagtacttcctttgttatgttcctgcctcttaaatctttctgctttaaagaactctccaagaaaatattttcagagtatacttttcagaggccctgtggaagccaagaataaatggcctccttttttgggtaaagagtcatatgtttaagatagttttatttgctccccccacctcctgccccgcatgcacacacgttgatatggttaactatcttctgctctgaatcagtattaagaatgggcacagagatgactaaaagccagaatttaccatattatcccacaaagcagtaacttttcaattttaggatacataatttcagcatttttcctatcactagatgtttagagctccctccagtgtctctatattgtcatatttactttgagatttttttttttcccaaagatcctaagaattcttttaaccatagcagggagagtatgttattgtctttaagcttacttcaagaacagaacgtgaaagccagaaatatcacatgcagccccacaacctatagattgtccattcctgctgtctgtgctttttttcaggatgaggagagttttggaggtagaagaagatgaagtggtcagaggatgggactcaggaggggacagggtaataaatatggtatgaaagttgctgcatttaaagagcttagggccgggcgccatggctcacgcctgtaatcctagcacttttggaggccaaggtgtgaggatcacttgagctcaagagttcgagaccagcctggccaatgtggcgaaaccccatctctactaaaaatacaaaaattagtcaggtgtattggcatgcatctgtagtcccaactacttaaggggctgaagcaggagaattgcttgaacccagaaggtcaaggctgaagtgagctgagattacaccactgcactccaacctgagtgacaaagtgagaccctgtcttaaaaaatttttttttaaagagcttgaataacttcctcttcttagaaaacgcataaactctgatgtgtcagctgagaagccgaggacctgggatttcaacctcttgcccgtgtgtttgtgattctggcgtgaaggtgatgatgcatttccaaagttgaacttggtctgctaggtttgggatgtggcagaattctggttcctgccagagtcccagtctttctgagtgtatgtgtgtgtacatgtgtgtgcatgtgtgacgtatgtatttatatccatacatacatacacgtgcacatctacatgtgtatgtatatataatcaagatgttcaaaattcaaagcgctgttttaagagagttaaaaaaaattcactatctacagatttgaattcagactgggttaaaaccaccttcctcctctggttgtcaagaggaaggttttggagttcgtgaattttttctgtggagttaagataacgtttgatgtaggagagcaaagctgcttcccatgcctaattccataaaaagcccagaacctctgaggcccatcttcagccaagcagccttgccctctggccttttctgcaacagtgagacaacagccctgggcacagcgggagttggttctgacaccagatgttctctgctcctggttaatgtcagtgagggctggaagttgaataaatgagaacaggagtggtctgggcccatgtaaatgatcctcccttgaaaggaggaacagctttcatcatttgttccagctaagccttgcatgcattatagatctggtgctaagcagtgggaaagatctcataagtaatgttttatgttctttctgtctctcctcttctgttgttcttggcttgtgggttgtgttcgtgttgttaactggaaaattgctataagccagttgtctcgtaagttttaaaaacgaattagaaaaaccataaaatcctctggcctatgcacattgtccctgttttgtgaaaacattaaagggtaaataaaaaggaaggagaacagtcaataatgtgcatcaaatatattctgagttctagagaaattaatgaccaagcattagaactagaagcaaaaaaaaaaaaaaaaaaaaaaaaaaaaaaaaaaaaaactgtcagtggttggcgagaagtcttgttttttccagccatatagatcaactgatgatatggtttggctgtgtccctgcccagatttcatcttgacctcccatgtgtgtgggagggacctggtgggaggtattgaatcatggggggcaggtctttcccatgctgttctcgtggtaatggataagtctcacgagatctgatggttttaaaaagaggcattcccctgcataagctctctctcattttttgcctgccaccatccatgtaagatgtgacttgctcctccttgccttccaccatgattgagaggcttcctcagccatgtggaactgtaagtccaattaaacctctttcttttgtaaattgctcagtctcgggtatgtctttatcaacagcataaaaatggactaatacgactggtggttgagaaaatgtagcagcctgagatttaagaaacaagtgatccctgagacagagcccttgaccctaaaggggaaaaatattcagttacactcatgagatataaacatagtacttttgttgtaactgctgagaactgaagagctaaaagtcaacattattttcctttttgagactcaaagtgtgtccaccaggagcactcttcccaatggaggcaaaatctgccaaagttgtttttgttgctgtctaaccttagaccatttcatctgccccaactaaaagtcctagccacagctctctcaagcgattctccaccctcagcctctgagtagctgggactgcaggcacatgtaccacacccagctattttttttaaatttttaaattatgttttttagagtcaagggtctcaccttgtttctccggctgatcttgacctcctggtgtcaagtgatcctcctgcctcagcttcccaaaacaccaggattacaggtgtgagcctggtcccccaggcttgacttggcacattgaatcttttatgaagaacaattaatgacttcccatgttgtgtaaagagacgggcaaatgtggcttcaaagcaagtcttgccaaccctcgctacaaccagactgtccctggcctaagcaagcccctcccatgtagacctggaaagccacttccaggtttcaaggatgagttttagaaaattaatggggtactagcatatgtgggtcaactctttattttaatgtaaggacactggacactttaaaataagttttctaatctttttaaaaaggaagggatattttaacatccccaaagtgaaaataatataatatcagagtaagtcctagaaatttaatattatggtacatttactatgttgtctttatttttcttcatttccacggattggccctggttctcagaccagcatgtgggaactactgggttggagtgttagccaataaaaatggccaaaaagtagaccatgaccttctttgagcttttctctggcttgtaattcccgaagctccttctagtgccaaaatacttctccctccctccctcttttagactgtaagctcattgagaacaaggacaatatggtaatcttaatatctttagcacacagtcagatatgaaagagacacatcataaatattggattaacaaatgaatgttctgaaggggaatgtggttgttgccactgtagaaaaggttcaggaaccaggaattcttgtgtaagatgtcatccacatagtcactggagaattccacagttgggttgagggcaaataggaatgccatgatccaggtacctagaactggcttgaaaacttgtaccttgcaacaataaatggaagccaatggccatgtggtctggccatggccacgtggtcagaagagaaggaattttcgaatgaggatagaggaagtagccacggagccctgaacaggggcttgggaggttgagctctctccacctcagagggctgtaggagaaacagggctgtctgcagggagccaaggttacagtctgggttggagagaatgttctgaggaaaggctgaagcaagaagagagctactttttactagattactgtgtattcagagggcagagtggaaataattaatactgagtgaatagaaggacagacagacctaaggataggtgagagaggtctgtctggtgcttctgaaagtttcaagtgtctaggaagcccccagcgttctagtggaaatgcacattctggttctgtcagtctgggtgggacctgagattctgcatttcccacatgctccctagtgatgctgatgctgctgggctgtgggccatggtgaggctagcgtttaggtcaaggaaacaagcatcttcagaggatgtcctccaggagcccaggcaacagttagaaggtcaatggaaaattctctggctgcagctgatcttttctgcttccctttagagcagggaatctcaacagcactgttgacatttggggcccagatcatcctatttggggaagcagggagatggagggggtggaggtgtcccgtgcattgggagaaatttagcagcattcctggcctctatgcgctggatgctggtagcacccggcagttgtgacaatcaaaaatgtcctcagacacttccaggtgtcccttgcagagcaaaattgcttccggttgagagccagagggttagaaggagaattatgtgtcttccctccccgcttgctgccacctccacctcttgtcttctagaaccatgaggcagaaatgacttaagtctgatatgcttggaacgcaacactcttttcgctatttctgtctttagaaatgttgagaaagtgtttgcctttatttgacggcctgattactttaaggtgtcctcggcatagaccagtgagcgccttggccctatttgctgacagttttaatagaacagcagggaaagtcctttccaagaaagtgttggctacgtagcctaacgtcattttaagtcatcaccatacacccaccaaacctctgagataaaatggaaactccatcatctcttgccagggtaatggtgttagtaattcactagtgacctctaagaatttctctgtgcattcactgccacatttaacttttgttacacggcctccaaaatgttttccagccacaaggtcagtccattgacaatctcaaaaatcctgacaaggggacagatgggtttagtttttgcctttgtgatggttagttctgcttaatgtgttgagaaaacatctgaaggttttaaccctggctggagtcgtgagacggaggcatgtttaatggaatagcacacgatcgtcctctcatggtgagtccacgttggagggcccaaagacccatgttgtacaatcggttcaactttttctgaaagccaaagaaaacctacctccaaacaggatttagtctcaagctagagcaaaaatgtacatcatgttgaaaagtcttctccaagtgctacaattcataagcagtgttgtgtttttactggaaaagcttgccatctagccaagcattcttcacatttttcccaggatttagtcataaaatcattttagacatattgcaaggataaaatgtgtacatatctgataaaaggcagggatttttttcttcttttttgctgtataactcctggaggaggcgaaaaacaaactagacacacacatacacactcacaaaacacacgtatttgtgcatatgtatgtgtatatagagagtgcacacatgttcatatatatacgtgtatatgtgtatgtatatagtttgttttccccctcatgaaatgtgtgtgtgtgtaaaataaactctatacacatatacatatatattattttcaccattaagtgcaagaacttggattctttattcacgattacttctatttgaatttaaattagatgccttaggcttctctttgggtttgaataacttagacacaaagtataaaacacttcctaatgatgcccacctgcctaggacatctttaggaattcaggtggaagtgtgtttgcatttgatttatctaagacgttgcagcagtggggatgtaatttctgcctttgggcaggaagggagcttagatggtggagttcgtatttgtaaacgtagatgtgggtgcctcaaagttggctgcgttgctaactaaaggaaggagagaagtgagcccagatgttgaccttttgaaaaaaaagtcccattttcatgacagattggcataaaagcaataacctgtggtaaagtctaaagaatacaagatttggatttctggatttgagtcctgtctatgcaacttactagatatgtggccttggacagatcacctaatctcacctgtcaaacagggacaatgaaactcaacatagcaatggttgcgaggagttaatgaggtaatccgtcaaattctgtggccgtggtgaaggatgatacaaatatccagtggcgtttttgttcttgaagatagtattcttgtgtgagttcttgccaacacacatacaattacatttctgagtcagactgatttcagtagcagataaacagagggagtaaatcagcaatagattagttggaaactctggacagcaatgatttggtggcatatggcttggtggtatgtacctgcacatgtaatcatggaaagttgactattcctactgttctcccctagttctatttcacttaagaaaaagttggaatggataccagcagtgtgctgataaaagtttagctactactggcggccgggcacagtggcactttgagaggctgaggcaggcagatcacctgaggtcaggagtttgagaccagcctggccaacatagtgaaaccccatctctactaaaaatataaatactagccgggcatggtggtgggcacctgtaattccagctactcgggaggctgaagcaggagaatcacttggaggtggaggttgcagtgagccaagatcgtgccattgcactccagcctggatgacagaacgagacttcatctcaaaaaaacaaaaaacaaaaaaacaaaaaacaaaacaaaaagtttagctactggctcgggaataacaggacgtttgatttgtagcatttactgatttctgtaatataaatactctcactgtgactaatttcaaactaccaatgtgacattaccaaccatgagattgtaaagagatgcacagtagcacaccaccatataggacagtcgtgcatcacttaataatgggaatgcattctgagaaatgcatccttacatcgtccttctgcaaatatcataaagtgtgttcacccaagcctagatggtacagcctgctacacatctaagctatataatgcagcctgttgctcctaggatacaaacttggacatagggttacgattgcctacagcactcagcaccttactgtactgaatactgtaggcacttgtaacacaatgttcctaaacatagtttttgtgcatctagacatagaataggtacagtaaaaatgaagtagaaaagattttaaaagggcacacctatatagggcacttaccatgaatggagcttgcaggactggaagttgctctgggtgagtcagtgagtgggtggtgagtgaatgtgaaggcctaggacatcactgtatcactgtaccccactgtagactttataaggactgtacacttaggctacactaagtttgttttttaaattgttctttctttgataataaattaaccacgctcagcttacttttttactttataaactttttaatttttaaaaactttttgataactttcataatagcactcagtttaaaatacaaacacattttacagctgtacaagaatattttctttctttatatctttattctataagcttgtttttgtagaaactaagtctcactatgttgcccaggctggtttcgcgcacccgggctcaagccatcctcctgcctcagcctcccaaaatgctgggattacaggtgtacaccaccacatccagtttataagctttttcttattaaaaaaagttttttttttttaagttttctgttaaaaactaagacacaaacacatacattagcctagccccacacagggtcatgatggtcagtatcactgtcttctacctccttatcttttccatctgtaaggtcttcagaggcaataccatgaatggagccatcatctgcgatgataacaatgccttcttcttgaacacctccagagggacctgcctgaggctgtttacagttaattggcttttttttttttttttttttttttttgagacggagtctcgctctgtcaccaggctggagtgcagtggcacaatctcagctcactgcaacctccgactccctggttcaagtgattcttctgcctcagccacccgaagagctgagattacaggcacgtgccactatgcccagctaatttttgtatttttagtagagatgggtttcaccatgttggccaggatggtctcgatctcctgacctcgtgatctgcccaccttggcctcccaaagtgctgggattacaggcatgagccactgcgcccggcctacagttaatttcttataggtagaaagagtccactctcaaataacaataaaaagtatagtatcgtaaatacacaaaccagtaacatagtcatttattttcactatcaactattatgtactgtgcgtaattgcatgtgctatacttttataggactggcactgcaggacgtttatatataccagcatcaccacaaacatatgagtaatgtattacactattacattggacagctacagcatcagtaggcagtagaaaattttcagctccattataatcttatgtgaccgctgtcacatatgcaatccgcggctgacccaaatgttgttatgtggtgcatgactttatatccactatacaagtagatgtaattaacctcagtcatacagataatagtaaaatagagtaaaatgagggatgatgatgagtttttgtttttgttcttgtttttttttttttttttttttgagacggagtttcgctcttgttggccaggctggaatgcaatggcgcaatcttggctcaccgcaacctccacctcccgggttcaagtgattctcctgcctcagcctcctgagtagtgtgattacaggcatgagccaccatgcccagctaattttgtatttttagtagagacgggatttctccatgttggtccgactggtctcgaactccccgatctcgggtgatccgcctcgcctcaggagtttttaatataatttattaaaccataagtttatataagttaatttttaacattggctatgttgaacgcttggctgtcaagcttaactgttagctctcacagacctggctccaacatgctactgtttctccttggctgtgttacagtacaaagttataccatgaattagcaagttcaggaccatcctggaaagccagcgtggaaaatgcagtcataaatggatttttatttctgtggactttggactggctgtctactcttggtctcacattctctactgcatatctctttggctaagaaaattagtattgaaaaatggtttatggatctagttattggagctagtattcaactttttagttacttaaaagataggacttaaacagagctgaattttatagggtcttttattttcttctttggtccttaagagaagactgcagaaaactagacaagaggaatttgaatgttctcataacaaagaactgataaaggtttgaagtgaaaaatatgctaattaccgtgaattgatcattacacaatatatacatgtattgaaacatcatactctagcccataaatataagaaattatcagatgtcaattaacaatggaataaaatgaaattaaattttaaaatgaaaacattctagaaaatattcccaagaagagatttatttatttatttttctggctatctatccttaagggttcgggaaaaaatggccggtggagaacaaaagattgaaattttagctcattcatgatgcacgtgaccgggaaggagtgttaagatgtcctgtacttccttccataatcacaggttgaggtgagggttgcctaaagtctgatcagccacattttgacagtggagactcagaggcctagttaggaacacagaaggaaaaatgttaaaggcagacctttataaccaaaacaatcaacaggtctaaaagccaaagaaaccagtatttcagaattgttaacttactcctagatgtgtgttaggcatcgggcttatcttaaagaagtgtcttagaccacagaaacatagacccatgatatttggaccaagcataggttaaaactaggggagggaggcacgaattacaaaaaaaaaaaaaaaaaggtgattccatgttagaatcccatgttgaaaaggtattacactttattgtaatacagacaagatttcactgtgttggccagactggtcttgaactcctgacctcgtgatcctcccaccttggcctcccaaagtgctgggattacaggtgtgagccactgcgtctggcctaaaaagcatattttaaaattagtcacatatggaagctaagtagtgcattttgtgtttccgaacaggacttaaaacgtcagtgccataaacactggtatgtattcagacacactggtcatatgtcatgaatttggtagacatatttgtaggcaaataatgtagagatagagtcacatattttaaactaaacaactcactatgaaccatcatgatggttcacacctacaattccaacactttggaaggccaaggtaggaagatcacttgaggtcaggaattcaagaccggcctgggcaaaaaagcaaaactcctctctacaaaaaaatttaaaaattagccgggtatggttgtacatctctgtagtcttagctactcaggaggctgatgtgggaggattgcttgagcccaggagtttgaggctgcagtgagctatggatgtaacccagaaagaccctgtctctaaaaaaaataaatatatacaataaaataaaaataaattaaaaatttaaaaagccactgtgattcttctctgtgatcattcgtaagtcatacactattttgtgtgggtgaaacatgtgatctgttagtgggtctgagaaaatcatatttattaagcaaaaaagtcaatatgtgcttgtgttttgcttatgaatttactcgaataaaatgtctgaaggtcttgaaacttcttaaaagaaaatggttcttacttcattttggtgtgtttacattaaggggagccatgtgacctcttatgagagttactgtcaaatttcaagtgcatgggcattgcctggaggacttgttcaaacacagattgctggaaagcccaagaatttgcatttgtaacaagtttacaggtgatcatgatgccgctttccctgggtgactcactttgagaaccactgtcttgtgagtttagagataaagaatggttgaggtcgtgtgcgatggctcatgcctctagtcctagcactttgggaggccaaagcgggtggatcacctgaggtcaggagttcgagaccagcctgcctaacatgatgaaaccctgtctctactaaaaatacaaaaattagccaggtgtggtggcgggcgcctgtaatcccagctactcaggaggctgaggcaggagaatcgcttgaacctagaaggcggaggttgcagggagccaagattacaccgcttcactccaacctgggctatagagcaaaactccatctcaaaaaaaaaaaagaatgggttggaaaaaatgtctgcacatcagtaagcacaaaataaccattgataaatagcattacaagcatccaggatcctaacaggaggggagaaaatcaggccactttagaaacacttttatgactggcagttatccagtttgctactaaggtcaggtctaaaagattgttaagactagcctgtttctgtatccatgggtatcagctggggaagccaagttctgtctttgtgcttggcagccctccccaatgccatgtctctgctgatgacattggaatttcctccaaattaaacagcctgacagcagccatctgtaaagaaggcagcaaggttacgagtgatcactggctagtgccatttctgctgccaaccaggcaggcaaagcttctggcatgttcttgaccacctctgagaagagttgatgtttcctttggggtatcatagagtttctgccacccagctctgtttctctgcctcctggtgcctgcccctaattattgcatagttgtcactgatcctggtaacctgactgctggatttttgctccagaaacctacagtaaaggagaccgtaggccaccagaagccaggaggaaacatcaggctgcagtcaagggcactgccttctcccctccaggctgctgggctttgagggcagagaaataaaaagactgaaagggattagaggcctggagtccacaacaaagccctgtagtcatccaccaccttgcacagcctcttcctgccatgcttacaggtgaaaagtctagttcataggacacattgcttttccagaaccttccgctgccttccagagccagcattcttcctgaaaactctctcttgccagttgtttgccttcagagttacagtttaaaaaccaacacttaaactgatatcctctgaagaaaaaaacagataacaaattcatgaatcatagttatacttaaatttcctccgtcacagagaaacatgttatttttagaaagtggatcccaaacctaactgatcagaatcccttgggggaaatgtttttaaaaaataccattacctgtgcactggcccagaaaatccagggccattagagactgcaaatgtctgagaatctgtgtttcctaaaaggcacaatggtgattctgatgggcagccatgtttgagaacctctgattgaattgtgcacaattttgatggtgctgctgttgcattataggtaattcaaagaagagcttcttttttttaaaaaaaaatagtaatctataaatataatagttttcatctgaatagtgttttcttgttttcagaagaccttcataactttttttttttttttttttttttgagatggagtcttgctgtgtcacccaggctggagtgcagtgacgcaatctcggctcactgcaacctccgcctcccaggttcatgtgattctcctgcctcagcctcctgattagctgggattacagacgtgtgctcctacgcccagctaattttttatatttttagtagagatggggtttatccatgttgtccaggctgatctcaaactcccaacctcagatggttcacctgcctcggcctcccaaagtggtgggattacaggcgtgagccaccacgcctggccataactattatctttgacaattttcctgggaggtggatgacaggacctgttactgacgccagtttacatctgagatgctgcagtggagaggaattggaactagaaccgacacttacggcttcttgtctggtgtactctctgctgttccatcttcattgcttgtgtgcatgcgtgtgtgtgtgtgtgtgtgtgtgtgtgatgtgtttatttgactccttgaatctatgttgtcttgtttttcgtaaatggattaacgccactaccacggatcatcagggagatatgacgctagagatagataagccaaatggaggtagaaaatccaaactgaaaacagggagagaagctaagatagacccaaggagtctaacaacccaagttctaaactagagagaaggccactgttcatctatttcagggatgggcagttatggaaatagtatgaactcaggcatcccaaaggcagtgcagtgtatgagagaaagatgcttgcatgcatactcccagcaaagctctcagtggggcccaagatgcagggcatggagggtaataaagattagccaggaaggtgataggacaacagatactgaaaacatggcaatgaaaaaacatcagcattcagaggtgagaattaccattgccagaagttcttgggaagtaaaacaagtacagagctatgggtcaaggatctcacagttagagtactagtagcagtagggtggacttgagtctgtagtttgggaccagctgctaacttaaagcctgggaagctcgtgttagccagacattacagatactttttatgtcaccttgaacaagcttcactatccttatatttaaaataaggagtaggcctattaataatctgtatgtatttcttgcagtaaggaaatctaattttgggaaatgaatagcaagaacatagcttggtgcagtgagtcagtgagaggatttacaaaaggtgaacgtacacaggactcttaatactgatcctgggctagtcatgtcattgcacatgacacctgctgttggaaggaacaggttaagcatttagttgtgtgcaatgaacctgtgagccctgtgggctggtcccacttatttgaaatagaacgattgcagtgcctatgtgagtcagggtacacctgaatgtttagttagtgctttccattaacccttttcaattttgcttctatgttttcttttcctccagaaggaaaatgagcagaaggtgtgtcacatgctcgctttttatctgctgcgtagttcttgtagtgaaaggattgtcgataagttcagaaaccaagactactgctgcctccccttcattcattcagtagtcttacagcctaaagaagacaagaaaattaaggactctcaaggcaaaaggaagtcaaatgaaattgggaagtgggtctacagtaaatgcaatatctgtcgctttcttttagaactgcataaaccacatggaaattttccgtgtatatttgctaccaagggatgctatcatctttttctttccttttttttttttctttttttttggagatggagtctcgctctgtcactcaggctggagtgcagtggcgccatctccactcactacaacctccgcctcccgggttcaagcgattctcctgcctcagcctcccgagtagctgagatgacaggcgcgtgccaccacgcccggctaatttttgtacttttagtacagacgaggtttcaccatgttggtcaggctggtctctcgaactcctcacctcgtgatctgcccgccttggcctcccaaagtgctgggattacaggcgtgagccaccacgccgggccactatcatctttttaatttaggcacatagtgctcaggaaaagacaaggatgatggatggtaattaagtaaatgaagacagcattggtcaggagggcagtataaacaaagtaaaatagaaagtctcttgttctattttttttaaataatgataattatatatttcttacagtcatatccagagcttacttgaatctaaagcagtatttatctttgcagcaagcctatgaattagctttacagactgtaggatgcagagacccttggattagaaaagttcagtaacccatgagcagaggcatgagaatgttaaaacaagtcactaaaggtcacatagcattccactagctgggctgtggttagcactcatgacctcctggggtctcatcttttctgaatcttattgaatcatgccagctttctgatatggtccataaaatgctgatagaaatcacatgtgaagttcccaactgtgaggacagcagacttcctttagaagataaatactagacctaatctaatacactttatttgacgtagcagaatttctcctgcatccttatttcaaaagcatacctgcctgtggtcttcccgggtcttaggagagtccatatgtctgatggaagcagacaatctagtgctactcagagaaaccaccacttgatcctcagtttttttgaggaatttcatgtgtttttatgtgaagaatcactctcaggaaagttctgtattttggtagcagagatcctgtcaagaaggcagtgagatagatacacataataagctgttcatcattactgctgatggaactcttcccaggcctgcagctgacagcattgcatgggacctgcagcccctttcaccgtgactgcagattctttggttaagagactgtcagtggtcaaggctctgccccggcttctcgggatcttcacactcccctgtgcatagtaggctttgggttattggccatcatgaaaaccaagattgtcgtttaatgatcacatctatggacttggggtcggaggaacctggattcacatcttggctcctccactgactggtaagttgcttagattagttgcttttttcctctctggctgaatttatgcaattgggagttttaaaaagtatccactaaattcattgttgttgttgttaagatttagttgtgtattgtacactacctggcatgtagtggatgtttggtcaatggtaactattaaaattattgcagatatcctcaggtattatatttttgacaggagatatctgatagcctgattcgatattttatgtggaaggaagaattaaatacagaagaaccctaagacaatgctatctgttctagagagtgtttcgttaaagttgcagtgtttcataacgaagcaggcaggacggccctctgctatgcagagctctcccgctcatgacaacacaacaagcactcccggttcatccctacctactcatcccaacaatgtttccaagttgttttaaggattcagaatggccccactccttttcagatgtccctgggagggtaacccctgccttgtttgagaatcacgagcaagcatagtctgagtttgacttctgtacccaagtagcagggcaccacctccctctcagtggctgatggagaggtcttccacagtgaactttcagtgaagaagttcatgtctctctacattatctgttttactcagcattcagagatatgtggtgcctccacaggggccatatccaggctttctgatgaccctatagggagcaatggcaatttaatgaggaggggaaaagatcagcttaacctagcttctacttcatccgggttctcatggttagttgagagtgctgatccgtgaccaccattgagtcattgatctcccgctcttcctagtcaatctgtcattcagagatttgcttgatcccttgtgccagatgcatgtatttaacaagctaacatgcactaagcatctgctatgtgtcaggtactattagacgcatcatactacaatgactaagacacagtccttgtcctcaaagaaatagtagccctgggagtaaaaatgatataggggaggctgggcacggtagttcacgcctgtaatcctagcactttgggaggctgaggcaggcagattgcttgagcccaggagtttgagaccagcctgggcaacatagtgaaaccccgtctcctttaaaaataatcaaaatatttttaaaaagtgatttgaaggagtaacatcctgttcatgttcagaggcattcagcctatgagcccaaggagttacgctcatttctctctatgtacatcttttagtcctaatatgcgtttcttcatttcttttatttttgttaccattatactctttacacaaggtccttcaccagagacctgttatcagtgtcagagacccagccctggtggccttgtgcagcagatcagaataactcaaggagctcccacatttgctctcctgactttctagaggcacacgatatccacatatgttaatgtattggttttatcataggtttctccttgcatttctttcatgtaaaagtgttaagagttcagtctgatctgaaagcaaaagtttaagttctcagcataactattcttacaatcttgtgcctttgcaaatatgttaaaatgttctcagccccctccagtcctgaactccccatttttttatggttaacgcgctgtcaccactacccagcagactacaaagcagcagcaagtgcaatgcagagaacgcgatgtagatcttgttcaaagcagctgacatgttgtcatctcaggaagggcagaatggcaaggaggagtgattgatggaaacttgatggagcaaccttcacttaattatttttgcatagattcctgaattgtggcttctttgctggaaaaaataataatgatcctgtaatgcagactgctttagaggctggaatgtgtcatcgtatgtgaggattaccacttgctcttttagaaccccaagcatctatctctacctagaaattttttatcgtgaagactaatagccttaagggtgaaggagaggacagagaccctaacccagagtaagataggaatgattaggaatgattgttggtgataatcagatgaacacactgtagccctgtatcaggagagaaaatgtgtttgagattagcacgttatcagaaaaatgtttgcacttatcttattctttgaataagttgcaagctatttctcttctttcacaaaggcaaagtagtaagccaaacctgtaatcagaaaaatattgatatgttagatagagaaagttatttttgtgtgtttgtttcagttgttgaatcaactggtatgtatcgagtacctactgcatgtagggggattgtagagaactttcagcgtcaagttagagattttaaactttatcctagaagtaaaacgagaaattaaggcactgagttagaaaggagctagaccatgatttctcccatatctcttgtgcaaatggcactagccaagccagaagcccctatgctgttcctccatgtgcccctgcccagccattcagcagccttggtgctgagtctgcctgggacatctcccctgtccgcctcctcttctccatgcttactgcccctgcagcaggccaaacctgatgacagctcagtggcattgcagcaagttcctcccgactgtttgccttgcctgtagaacctggtcccttctcatccatcttctactctatgaccagagtgacatttttaatcaaaaaatgttcctgcctaacccttctgagattctccataccttcaagagatatcttggggagagaagggcactcgttacctccttcctcccctcctggcatgccatacttgtgcttccctgaatgtggcatgtccccttatgtgactctgcatgagctccctcctctgtctagacaatgttccctctcacatcacatgcagtcacacattcctgtgtactcttcaaaactcaaccctgccatcagctccaaggagcccaccctaacttttccctcctggtctcactgagccactctgtgcttcccacccatgaaactcatatgtaagatttttagtgtctgttctcttgaccatctctgcacactggatacagatgtattagtctcttctcacattgctatgagaactacctgagactggataatgtgtaaagaaaagaggtttaattggctcatgtttccacaggctgtacaggaaacatggctggggaggcctcaggaaacttacaatcatggcagaaggagaaggggaagccagcacgtcctacgtggctggagcaggaggaagggaaaggggaggtgctacacacttttaaacaaccagatctcatgagaactcactatcatgagaacagagagggagaaatctaagcccgtgatccagtcatctcccaccaggcccttcctccaaacactggggattacaatttgacatgagatttgggtggggacacaaatgccaaccatatcaatggagctccttgagaacaggaactgtgtcttttagatcttctgttttatatgtctgatgcatagtaggcagttggtgatcactcatttggtgaatgaagtgttaggctgaactgaagtgggaatgaatatgaagagataccacacacctgcattccttgctatctgtgccatttgttccatctcatatctcatggtcacaccagtctgagcaaggtcagatactctttttagagaaccttctgtggccttattccatgttcagttgtttaatcacgattacctttatttttgtattggtccatgtcctgagtattttttaaagcattgactgttgtggatccatggagaagtcagagaaaacagatgaagctctctgataggaaaaaggattgaataatcttgccatccaaactgtggtatcaaaatatgactatatatgttgcaatcaggtgcatgcgtttcttggctttcctggatgtgcaaaatagaattcaagacagggtacagagagaacacattctacataccccacataaccttggcatgactgtttggaccttgctggtaagaagtggcattggctagtcttttgttcacaggctggcaaggttgctcctgattttctctttacacggataattcctttactgaccaaatctcatgagagcaaagtgaagtatcctgtagctggcactacattcatgaccttttctatgacaggttaatcatttctttgtgtgttcactcactgacctttacttcattggccaaaggagtgccccatgtcaaagtaatgtcctcgttcctccattccatcatccctttggggcagaaaagatgctgtcttacccgtttttgtccccagactagctgggtgcctggtgtgtagatgttaaatgaataaattgtttaggcaaagccgttagtagcatgatctaatgaccacaaacagaaaagtgtgtgtggtggggaagggcaacttatattttaagaattgtgttttaataagtggtgaattatttcagtataaatccagtattatcattaataatagataaatatattgagcatttaccataagcaccatattctatcgcctctcccattacgtgaaagactaagttttatagtttgaaaagaaggaaaataggaaatatataactacatttaatattatagcataaagggctcaagtggaatgatgctggtatgacagagtattcccaacagtcctcccagttctttttacattaatataaaatgttccatgaattaaagaaaaatatagcaagtcataaacatttacaattctctttcctcaccatctaaggaggacaagttctgtgcttatttagcttgctattccttgtgaggtcagaaaggtcaatgattaaacttagattaggccaaattcctccttaagagaagatatggtgcggggtagggagtggggaacataagaacagccattatagggacctgtaagagaggagggcgagatgggaggaagagcaatcgtcctgggaaaagggaacttgggacagagaggagtaacaaggctttcagggagtctttctgagcatggtgccatgctccctactccccacttccaccctccccactccccccctcccattcacctctgccatccaggccttcccaggaacacttggccaagacttgcaagtttatttattttttttttagctcatcagctgtcattagtgatagtgtcttttatgtgcagcccaagacaatttttctccttccagtgtggcccagggaagccaaaagattggacacccctgctctagatgtgagtcttggatgaccacccttcactctacctaggctacagtaacagacgttgaaagtcagcatcttcattgttatggaggaatggaaatgggataaactattttaaaacaattttggatttaaaaaaatagtttaaatattcctgttctctcaccccacccacccctaacttctttgcattattaattttcttagctaatcttatttctaaaaaagcaaaaccttccaagggaattctttttcttttctttagggagagagtctcactcttgtcacccaggctggagagcactggcacgatcatagctcactgcatcctcaaacttctgggcccaagtgatgcttccacctcagcctcccaagttgctgggactataagtgcacaccaccgtacctgggtatttttttttttttttgagatggaatctcgctctgttgcccaggctggagtgcagtagtgtgatcccagctcactgcaagctccgcctcccaggttcacaccattctcctgcctggctatttttttaagcttcttgtatagatggggtcttgctatgttgcccaggctggtcttaaactcctggcctcaagggatcctcctgccttggcctcccaaagtgctgagattagagccataagccaccaggcctggcccaaatgaattattaatttgttttgggtagaattactaatagccaattactagttagtggaacttcaatttgggatgtttttatctatttgaataaactttcattctgtataactccatgtctaaatctataaatgtagacatacatcagtatagaaacgtcagtggctcttagattgggtactttaataataactctccatgactgaccactggggacttctcaaggagcaggagaagtatctaccaaacgtagatacctgagaaatagtggagtctgctgtaatgttcactgtggataacctgactggcagagttgtcccttctggaagagaggcagctcaggtcactgtgtaaggcacctgtcttaacttgcaatgggaattttgcagtcaggtgaggggcacaatatatgtgaagaggaagtgaatgttgttgatagcatcacatcataattaaattccagccactggatgatgaagtcattccttcacacacaaacggcattatatgcctgtaatatttttccagggctgccattacaaagtgccagaaactgggtgacttaacagacattgagtgtctcacagctggggggcctggaagtcagagatcaaggtgtgggcagggccatgctccctgtgaagatgctcgggaaggatctgttccaggtcactccctagcttctggtggctccttagcatgtggctctgtcactccagtcctcacagagcactctgcctgtgtgcctgagtccacatttccccctttttttttcatgatggagtcttgctctgtcacccaggctggggtgcagtggtgcgatctcacttactgcaacctctgcctcccaggttcaagagattctcctccctcattctcccgagtagctggaattataggcgcccgccaccacgccaggctaatttttgtaatagtagagacagggtttcaccatgttggctagactggtctcgaactcctgacctcatgatccgcctgcctcgacctcccaaagtgctgggattacaggcgtgagccaccgcgcccagcccacatttccccttttcacaaggacaccagttctgtcagattaggaacccctctcctccaggatgacctcatcttaactaattatatctgcaacaaccctatttccaagtaagttcacattcagaggtattaggggtcaggatgtcaatatataaatttggagggacagaattcagcccataacaatgcctgccagtggtagttttttgggggtcagggtgagtctagtatctgcattttcaacagcatgcctttttggggagatgagtgtcaagcattcactgatttgaggtaacggggccctcttgagtctgtgatgtaatctcacactcccctaagagctatttatggcctacaagcctgtgcacatttgaatgcgcgtgtgcagaaaagacaatgagccagacaggcttctacacccacttaagagcactcacatggatcagtcacccaccctgaatgccacgttagttttgacatctgaaatgtgtctggcattttcaggcagagaaggcttttaaaaaaaaaaaaaagtcacatggatgccagttccttactatctccctaaaagagcctaaacacagaaatccagacacaggaactcacaagaatattagataataaatagccaagcttctgaagaggcctggaaccagagaatgatatttaagggttattaagcttaattttttgcactgtggtctgcctggcatatagtagacactcactgaaagtttgtgaacagatgactaggagagtctctgttccgtgggtatgaatcttaaagatgcatgtattcagccccttctcctggcttctgttctaagcagagggaatctgatgccttgtttctgcgcatctgtgatctgggcagattacagatgtcacaagccagtgatgtacacctggattgcatcctgaccaaaatcagggaagtacccgctggcatgttgaggacctcctttgaagaaaatcctgtggctaaaccaattcattgcccttgggagagaaacattctatagcctgctgggtggatgtgtacagtccatgtggacccacctaagtttcctattttgttccttctttcttgttttcctttccttcctcttttcttactttttaagccacttattgagtttatcctttcaaaactcatcttgaggatatgttcaaaaatgacccatctagagcttcctgtacacttctttgcagagtgagttgctgctgacttatttctccttccagcgtcttgctgatgcctctgtagagtcatttattacctgcgtaagagtgacctctacacgtgcctggttcccaacaagacatggagtctcaactgaattttactcatctctgtttccctaatacctagtgcagtacctggttagcacttcctggatgttcagtgtatggttattgaatgaatgaatgaataagctgttactttctgcttgcatagcactgttctagagtgtcatggaggacacaaaggaatagaattgatagtaggtcattcttcagttgcgttgcatcacaagggtaaaacgtgtacttattcaaaataagtggcataataataacttcttaaaatttttattttatttttccgtaagttattgggatacaggtggtatttggttacataagttctttagtggcgatttgtgagattttggtgcacccatcacctgagcagtatacactgcaccatatttgcagtcttttatccctctccccactcccactcttccccctaagtgcccaaagtccgctgtatcattcttatgcctttgcatcctcatagcttagctctcacatatcagtgagaacatatgatgtttggttttccattcttgagttacttcacttagaataatagtctccaatctcatccaggtcactgcaaatgctgttaattcattcctttttatggctgagtagtattccatcatatatatgtaccacagttcctttatccactcaattgatgggcatttgggttggttccatgattttgcaattgtgaattgtgctgctataaacatgcgtgtgcaagtatctttttcgaataatgacttattttcctctgggtagatacccagtagtgggcttgctgaatcggcatcataataacttaataagtcaagaggaggtctgggcactgtgctcatgcctatactcccagcattttgggaagctgaggtgggaggactgcttgaacccaggagtttgagaccagcctgggaaatatagtgagactttgtctttacaaaaaagttaaaaaattagccaggggtggtggtgtgcacctgtagtcccagctactcaggaggctgaggtgggaggatatttcagccagggcagtcaaggctgcggtgagccgtgattgcaccactgcactccagcctcggtgacagagtgagaccctgtctctaaataaataaataaataaataaataaataaataaataaagtcaagagaggggcccagtggtgtaatggaagagcactgttcatagaatctgtagatttgttttctagtcctggctccacaagttacatattctgtgctcctgggaacttcccttaacctacatgagcctgagtttactgatctaaaaagtgggcctaacgcctatctgaaagaattactggggatattaagggtataatgtatattataaagtgcttggtaagtcatagcatggtatctaaatctaaggtatgttgcttttatgacacaaggcagtatctgagttaggacagaccaggggagtggtacaatcagttaatgttctgagttgctgggtaggagttagcaagtaaggcacgtgcaagaattagaacttggccagagctttgaagaataaggccacctggcatagacaaagggaagcagtgtggcctgagtacctgcacacaggttgtggtgggccaggaggatatgaacgagccccatggctgccatagagggctggtggtgcccgagatggccctccttgccatgaagtaggcagaaggcgcttagagctctagtttcccaaatggagctcaattgcttgtcatattacatacacgtgctgttatgtgtgatgatgctctgttctaaccctgaaagacctggtggagccttagcaaatcactggccattctcccaaacactgcgtgtgcttatgctatgccgccatagttttacaagcatttttcagcgtttatgcaaatgctgcccttctgtctttggtaactgctttgctcatctttcaggattcagcttacatcttgtcttctctgtgccacattcctgtcagcagccacctcacaccacccgctcctgtgcacacaggcgtacagagatagtcttgttcctctctgctcttagagcaccattcagctacccccagtggagcactaatcccagtgagctgtgatggtttcttggtgtctgtctccccgcgagaccatgggctcttggtgaacagcggctgtagcctgttcagctctgaccctccggaccctcatataacctgtatgacccatgaaggtgcacagcaatgggaaggatgagggaagaagaaggatcttttcaaactctgtacattcttcacacagaaaagcaggctcatatcagctgacttgttctcccaggcagagaacaagagtgtgccacattcactccagttgaatggtttcaaacttttcttcctttgaggtggatgtatttttggcttttggcagtgtcttagtccatttggactgctaagcaaaataccgtaaacttataaacaacagaaatacatttctcacagtgctggtggctgggaagtccaagatcaaggtgccagcagcttcaggatttggtgaggtttgatttttttggttcatagatgacaccttcttggtgtgtcctcacatggtggaaggagcaaggtcgctctctggggtcccttatagatgggcactaatcccatatatgagggatactgaaagtaaattgatggaagtgctcgtgtgaatgaatgaatgaatgaaaccattttgaagctagattgctaggttcctgcaggttatatctttgtatactccttacctttcaagaatgtctgcagctctctgcatacaataacttccttgagtatatataactacagtatgacaaggcttttaaattgaacaattctaaagactgtttttttgagtccaaaaagtagaatttggtatcaacattaggtttaaaagaagtgatttcagagtttgtcaactattcaagtgtcagaaaaaaataatgtaaatgatgtgcttaagacatttatttttgtattctcgattctcctgaaataaagggaaattgtcttgaaaagctgtagattttaaatgaaaaggaaagcgggaaggtgacataatttgcctctgcctttgcagaaattcaagtgtatatggcctctctccaatccaccattttcccacctccacaggccccatgtcagctgtttccttcatatcattgcaatgctttgagggtgattgttggtttaagctacagtcccttcaaatttgtgaaagactaaacagattgataacaactccacctagattaaatgaaattctgtgggtagacaggctagtcaaaatacaatccccacacaccccaagtgagcattgcttctcctttcagatatgctgtgggtacaaagaaaggatttagtccaaagtgccttggggttttgttcagtccagagtgtaatttttttctctcttttgcctatagccatttctgtaacattactgaaagggcttttttcctaatgaagcatgaaaattgatcgtatcttgccaggagagttcttcctaagtcttaagatattaaagatttcatgagaaccgcatgaagaatatcttcttgaatcatttacatttttcccttttgtaggcttatgtaaccatgcagaaaatctaataataagtgtgctattagtgtaccatgtgccatcccgcaggcagctgtgccatggggcaccagtgcccagggcttgtggatagcattaacctgtacaactttctaaagtaaagcccagtgggaaatctgtaggtaattgaacagatagtccatttttatcagacttccccctgccccttccctgttctgtcttttctcttttcttgtgccagaaggaaacaccttggccataggcctttcattcacaatggagtatattttccaaagcaaatagcttggactatttcaattcccagagcaatctaggtgggcacacagagctaaatttgggtttgaaagaactcttaaattagtatcataggaaggcaatgagcaggaaaaaaaaaaataaagatacaagcattgtggtctgatggaaattatccagcactcacttacaaatgacaagtgggtaccacccagcctttctcatgttccaaaatttaataaagggttccatctaggtcccccagaaactactgtgattatcagggtgagagaagggggaatgatgaatttttgtaatgccccaatctttgtaaccaggcatagaaggacattcgctgggctcaggatgggtgttagcatgtagtggataaaggaattgcagagttgttgacagctgtttcctcagagacacttgtcctgatgatatttgctttggattctaagtaacagagctgtagttcttaaagtttaaattgaaaaaaaggagttttctgtcaagtggcttagtcatggaaatcagtgaagttaagcttgggcaataatatatccttttcaaatccaggtgccttcctgatcatgccagagcttttgtgactcctttctccttggtgttcttcttttgatgcggcgatagggtctgaacacgtccaggctgtctttgctgggagagggcagaatgcctcggctttcttcagccttgcctttcttcattgtcttcaccctgcagcacttctgcaaagctgctggggtaggtgggtgagtgggcgtcttttctttgctagcccaagctgagttctgaagggaagttagcagggctcagctgctgccgcaaagtcagtcagaccaattctcatttgcatgcctacagaattagacatattcaggggctcgggttaatgccataccctcctcttgtccttggaaaactgtaagaatgcgtgcaggtaactctgcagcaattctgtgttgctcagatgtatttctcttctttcagaattcctccttctatagcattcccctaatatttatgtgctggggctttcttctttcatcccaggccccagcttcgctctatatcagacagaggtgggagctgctgatcaagggggcacacttgccatccaaacctcacgatgctcacaggtgtcctttcaaccctgctaacccagatgatacatcaccatttatacctttggaggcattttctctttaattgatgctcacttagacctaagattgttcattaaagtccagaggtgctcattaaaatgaacattggatagtgtggtagatgcaggttatcattatgaatccaagaaagggctctgtggaacttgttatatacggcatttataggttgttaaattaaaggattagtgttgtgctaaaccattttcaggttaatcagttgtgggaaaccagatctaatgttaaagcaggcttaaactatggtttttatagtagggaagtttttaagctactgttatttctaataaaccctctagcttgctaatcgagcatacttttcaatttttgcacttaactgaatatggtcttgttccctaatttttttatgtgtgggctttatttcttcaagctggattgtaagttcctttttagcagggtctatgtcttttttttttttttttttgctcatatcctaaaagcttctggtataattcgaggtatatagcagatgctaaggattttattgagtgattactacatttttagagtgtcattacaatgtattatcacctggtttatgccgtggtgctttatgtaacatgtgcctatttacagaacattgatataacatgttggtctgcaaccaggttgttatcagcaataggaaaagcattacagagttcatatggaagtagaggagaaacaggtctaatttgggtgtgatgccctgtattagtctgttttcatgctgctaataaagacatacccaagcctaggtaatttataaagaaaaagaggtttaatggactcacagttccacgtggctggggaggcttcacaatcatggtggaaggcaaaaggcatgtcttacatggcagcaggcaagagaaaatgagaggcaatcaaaaggggaaacctcttataaaacaatcagatctcgtgagacttattcactaccacgagaacagtatgggggaaactgcccccattattcagttgtctcccagcaggtccctcctacaatatgtgggaattgtgggagctacgattcaggatgacacttgggtggggacacagccaaactatatcatgccctaacctgatcagatatggcttccagactggcccctggagtggcctgaataccttcaccaagacacgtgtgtgggacagatcaaaagtttccatctgccatttgtctttcacttggtaactgctaatgattgcttgttaaccatacacattaatatgcccgtgaagcagatagaaaataaaataagtaaaaaattgtataagtggaaaaactaagacccaaacaagaaattatggatcatttctaaatggtggccaggacgtttatacggagaaaccataccattgaaccataatcaatgtaagaatacaactgatggtttcagactttcaggaatagaatgagtctcaggcagacatgttctcaggcaacatggcctgggacatccccagaaacctcctccatggagttaacaggacacctacatggccctatgtgtccctccacttgggcctcttgttcaacctcgtatcacatgtccccttcctaccacataaacttctgtctctacattctctactctaccacaggttcatttatttgtttgtttgtttgtttgtttgtttgtttgtttatttatttatttatttattttgatacagtgtctcactttgctgtccagctggagtgcagtgtgcaatcacagctccctatagcctctgtctcccaggctcaagtgatcctcctgcctcagcctccctagtagcaaggactatagacatgtgccaccacgcccagctaatttttaccttttttttgtagagatgagttctcactgggttgcccaggctggtctcaaactcctgggctcaagtgatccttctgcctcagactcccaaagagcttggattacagacatgagccactgtgcccagcccacagtcatgttttaaagtgtctgagctataaatactactataaaggtgtcaactggttgtatatgtgggcccttggcatttcagaaatgacagttattgccaaccattaccaaatggaatccattttatccaaatgggcatggttggggctgagcatgggatggagtaatgcagtcttattgcatttcagtgttagagggctttcactcggtttgcagtttctccacagctcacccaccaattctacctgtgtacttcttttctgttccctctcaacttcttttccattctctccttcctcttgtttctgtccatatctctggcttcttttaatttcccttttcccttctttcttattggtctggccctgggtctggtgagaccaagggcacagaaggatactggctccatgccaacctttcctccaaggcacaatctccttcttggcatttactgagatgttcaacttcctgtgtttctaatattccttcctgttttataaaagaaaaatagattggatttgcaaagtgccttaatttgttgattttctaaaaagcaattttaaaaatgtgtatcaacaatatcacatacatgtaactgatttattgactctggcttgccctgggtttaatcacacataaagaaattttacaataacacatgatccagtagagaaagaagtcaaagaaatatgtaaagtcctgtgacctctgtagacatttgggattaaaccaaattaaaacacctgtatgggctgggcatggtggctcatgcctgtaattccagcactttgggaggctaaggcaggaggatcacttgagcccaggattttgagaccagcctaggtaccatagcaagacccaatctctactgaaaaaaataaaaataaaaataaaaataaaaataaaaataaataaccaggcatagtggcatgcctgtagtcccagctactcaggaagctgagatgggaggatcacttgagccagcagtttgagactgcagtgagctatgattgcaccactgcactctagatgcaacagagcaagaccctgtctcggctcaaaaaaaagaaaacacttgtatcaattcaggtcaaatattggtttcttttttttaagagcagattaacatcttgcatatcttttgctatcacatttcttcttatctgaccagctgaaatggaactagtgttaaatacaaataataaaacctgtaaagatcctaagtttttgcatggtacaataaatcctcactcattcacatgcttggagaaagtccagtctgattcaattaatgaaaagcaaaaaaaaaaaaaaattgtaactacataatttttatctcatgtattagctcctatttagttcacataagtgttcaaataggtactcatttttaattaacaaaatatttgtgtgtagtgagtatttttaaaccaattaaaacagttccttcttgtaagtaaattaagtgctattcttagacgatggtatgcatcattcatttgctttgcaaaccattctttcacaccattctagttggtgtgaaagcaaattgagcccatctctactggaatttattgcattctcttaatttctgacactctatgctcccaatagtagggactccatcttagccaccacgacatcccaggcatggctcctagaataatttcagctctttaagactcaattaatatttgctcactgattaatatttagctccattaatttatgtgtccaaattccttaccatttgccaagtgcttttggattttacagttagttacaaactgtagtttaaggtttttctggctttacttcattcttcctttaactagctttaaaaaactagtttataattctagttacaatacaatgttaagtgaaagaactgattcaaaattatatattcagaattattctaactttgtaaacatgcatagatatatgtgagctttaaaaaagaaaattatatatatatgccaaaatacaatcaaaatgtaaatagtggatatatcatgttggagatattaggagcagttttatattttttaagttttctgtgtttccacatatgatcacactttatttttatatcagaaaaaagctatcttagttgtgcattgtacattagaaatattagttttgaagataacctaaacacaagtttttatttcttctgtcacagttgcctcttttcttaaaatcgtgtttgccagtttctttcacgacactgcaaacaattttagtagcttcagttctttgataaatctgtagcttttagatctttgattactattagcaaagaaaagatagacccaaatgaaaaacagttgcatttttgaaatatgtccggcgggggttgatgtggaaagaacaattcctctcaactccagggtcaaagcagcagccctgccaggctctgtcggggtcgcctggagaacatcacttaactttctacatcagttcctgcttctggacattataacattcatgatatccacctcatgcaggattcctgggaggagcagatcagatcataatgtgtgtgaaggggctttgaacgacagtcaccacattattaccaccataagcattatttccatttcaaaaatggtagaggagggaagatgcagatgttctctttatgttggctcggcaccaggcacgtccaggttgtgctgctttaccctccagcatgaagagttagaaggtaaatatcgatattgcttttcataactaatagcttcatagttcatgtcaggtgatttcttggcttccgttagcatttcagagaccattatacacagcagccatcctctgcagagctggagaaaactcatttttcaaggcaaatagtcccaagtcagggttcagtcctggtggaatgaaataaagaaggagagtttatctttaaggtaagctagcatttaagtagatgttggatattatcagagatgcttatgaggggcagagagcattgaagacttataccctttgcacatctttaaatgcctgtaagtgcttaccaggagccaagagcgaacgggtggctgcgtgcaaatgctagaggttaacccctgtccatgggcatttaccgcatgagtaaaaatttattgcagagttcaggactgtgattctgctgctcatttctgtagcgtatttctttatctgaaaggatgcccattgtcctttctagctttttgggccataaccgtgagggaaggcccaaaggaagaacctctgttggagatcaggtttattcatccatgtgggtggaggtacgaaggagggaagaacctctgttggatatcgggtttctttgtctgtgtgggttggagactagtagaataggggaaaccacatactgcccattcctccaggatcattttccatttggatatttagaaagcaacaagagaggagttttagaagacaaggtagatgatttcaagttactttaacatagaggaagaaagtttccttctatttttaatggctagtgcatgatttgtgggagtgaagattgggagggggcacggacgaacaccaggaagaggcggttaatttattggtccccattaattgaatttaataagtgagttttgtcagtttagcaatatccattagtttcagagagtgtttcagtattattctgtaaaagcatccagggatatattttacagctacagcatagattatcttgcacacatattgaagtaaagatacctttcaacattccagatactgacttttcacccaaatttgaaaatctccatttagcactttctaaaataccagtgaaaattaatatagttttgtagatttatgtactaagatgcagattaagacatgtggaatctaatgaacatagcaggaaaagaaaattttctcaagtctgttcattactattcctcatcacattttttattatttaatagcttattccttgaatatgtgtgacttgggattagatgtgccagttggaagacctcagaggttcagaaattcacagacatgtgaaatataaaaccgtattcatttagcagatactgataggcatataaaatagaaccttcatcatctatctttagaaaaagaagattaaacagaagtgtaattaatttgccaactctgcttcccgattgagacatttatcaaagttgatctttaatcattagtttcctaatctgtaaaatgaagtctattatgacctctaaggtctatttgtaacagttaggattaggttcagttccatatcaccaaaaaaaaaaaaaaaaaaaaaaaagaagaagaagtcaagccaaagaaatagacatttatttttctctcacataaaagtggttttgagaggtaagcagtccagggtgattatggtcactgcacaggctcagaaacattgtcacctttctattctgccatgctgtagtatatttcttttcttttctttctttttttttttgagacagattcttgctctgtctcccaggctggagtgcagtggcatgatttcagctcactgcaacctcttcctcttgggttcgagcaattgtcctgcctcaggctcccgagtaactgggactacaggtgcgcaccaacatgtctggctaatttttatgtattttttagtagagacagggtttcacatgttggccaagctggtctcgaactcctgacctcaagtgatgcacccgcctcagcctatgtctcacatacaagatggctgcatagctctagcctttaacattaccattccagaaagcagaaaggaggaagagacgaaggacctaccccctttccaaagacacttgccagaggaaccataccacatttttgtttacttcatgtcaacaagaatttagtctaggcatacctagctgcaaggctaggcataccttcttgcaagtctaggcataccttcttgcaaggcaagaagaagatcaggtcattcagttgggcagcaatgtgtctacctcaaaaccaaggtttctacttctaaggaaaagaaggaaagtgggatattggggtaagcaacaattatccacaggttttgagctcaaaaagccgtgatcgcatgtttctgggaaaatttgacctatacaatcgagtctgaatgtgtgctgggtgtgtacaaatcagacaacttcaactgtgagccttcattagctctcccctttatctagacttaggattgtatttccaggcataggtcagaatctttacactgattgtgtgtgtgtctgtatgtgtgtgtgtgtgtgtgtgtgtgagagagagagagagagagagagagagagaaacagaatcttggctgcaagatgtgctgaatataaacacaataacttagcaatttataactgcccctttcccatctctgccccctccccagtatcagcatacgcagtgttacccccacactatcaatatgtcaatgattaatagcaactggcaaatgtgtgctttccatgagacttgtatgcaaggttactcgggttcacagaggctgctaataacagcagcactattgaattatgctatgtgtctgtgtctgttaagacaggtcggaggacaggggaggaaacttcccccagggtaattgagagacaaagtcactaaaagctacagatctccagtttgggctctatgcatgagattgttcttaaaagtcaaagaaatataaaaggaaattgcacatttgtaatttttttaagttccccatttcatagctcattaaaaccaggactttaatattctgggtcagaacccccattggatatttttgtgaacatgtaacatgtgggttgattagaggtttgggcctgtttttttctttttctttttttttttttttcagacagagtctcactctgtcacccaggctggagtgtagtggtgtagtctcggctcactgcaacctccacctcccgggttcaagtgattctcctgtctcagcctcccgagtagctgggattacaggtgcccgccatcatgcccggctaatttttgtatttttaatagagaaggggtttcaatatgttggctagtctggtctccaacacctgacctcaagtgatccacctgcctcggcctcccaaagtgctgggattacaggcatgagccaccgtgcccagcctggcctattttatttcatgcatatatagtttaagtgtctctgagattcttgatcaactaacaaaatccaagaggcccttttgttatattctaaattcattcctgcttctgattgttgcaaaggggtcagcggatagggtgccagagccagaagttagctaggtggcaggttctgaattaatgtggtattctgggtaatataatgtcatttcctagggaactgccagcatctagctgacctccaagaggacaagtggtcaggaaggtggagatagtattagaactgttattattgttgttgtttttaacaagcagacctgtcatgaaacttgccatagaggtccccttttccatatatcaccaaagcctcataggtaagaaaaggtaaacatccaagattgtttctttaaagattgctgttgggcagaccaagatttagccacaaaaataaacataatctctgatgctgagaagagatcagaatgagttgaaacacaggggaaaaaagaagtaagcagaaaaaaattttacaatagtagatatggggattagatagatagacggctatatagatatataggactctgaatagacccattacaggcaggcatgtaagtggaaatgattaatatatagatgtagacacaggtaattctatataaatgtggaagagcagcaggaagtttctacagctgggaaggaaaaggtaattttttaaaaatgaggtcattacaggttgtttgggtccaggcagattcccattgtcctccctaaacactgcttgtaaacagttttgggactgaatgcaccctttgactgtagtctatgctttacattgactagaactgacaaacagatgaaaagtaaaataatgtttctagagattttctatttggttatgtcatttttttccatggacacatctggctaaagccaaggggtgttaagcccccaaatgtcatttgaatgttcttacagtatgaagaagaggaagaagaaacactttgaaaaccaataattcggccaggcgcagtggctcaatgcctgtaatcccagcactttgggaggccaatgtgggtggatcacctgaggtcaggagttcgagaccagcctggccaacatggtgaaaccccatctctactaaaaatacaaaaagttaggcaggcgtggtgatgcgtgcctgcagtcccagctactcaggaggctgaggcagaagaatcacttgaacttgggaggcagaggttgcagtaagccaaggttgcaccactgcactccagcctgggcaacagagtgagactttgtctcaataagaaaaaaaagaaaaccggtaattctgttttggaactccttgctctgctatggcacatgtatacatatgtaacaaacgtgcacattgtgcatatgtaccctagaacttaaagtgtaataaaatatatatatatatgaaaaaagaaaaagaaaacaacagtgctgattgaggtgtcacacttttgctggttgtctctcctgggtatacctctagcttatcaccgccattctgggaagacaggagcaactgccttttagctgtagtcaccactcatttccctgttagccccttgtggactggaagctccttgaaggagacaaggcaccaagtcacattttacttcatatcccaccaccatgatgtgcctggcacgtaaatgttgaataatctgaacgagtggatccctgaacagtttaataaaatggggtttaaggagactgtgacattcatgaatagcatcacatccaggcttatttctatggctttctattgggctcaatgcctgggtccctggcacatgagaaacaagtatccttgagcagtaggggaaccataccttattcttaccacctcaaaatatctagaactggctgggtgcggtggctcatgcctgtaatcccagcacattgggaggctgaggcgggcagatcacgaggtcaggagatcgagaccatcctggctaacacagtgaaaccctatctctactaaaaatacaaaaaattagccaggcgtggtggcgggtgcctgtagtcccagatactcgggaggctgaggcaggagaatggtgtgaacgtggaggcggagcttgcagtgagctgagatcgcgccactgcactccagcctggcgacagaacgagcctccatctccaaaaaaaaaaaatctagaacctcagcatgaagccatttttaaaatggtgccctatacttagtcaaattcaggcaattcagtttggggaattattttctgtaaatgaggtgctctgaatcagagttctgactccagctttactggctgcctaagtgccatggtttagtgtaatgaaaatacagtggggggtccttaaggcatcattcagggtctacctttaagcgactccagctcttgaacttaatgaactggacactttcaagttctgaacatggtaaataaaagccagcacctgctgccaaaataccttgtctcataatcaaaatcatttctagagccagcggaacatggattccctgagaaattcccactgactcagcaattttaggttgggattttattttagagtcacttaacgaaaagatttcacctagtggcatggccccaatatttatcaggtaactctggccccatctcagcagactgactgattcaatcatcttaccctttactggggatgaaacgaaatgcttactaactcactcctgaccccacctgccactccaagtcattccagcaaacaaatccgtaatagattgctgagagggggaagataggtgaaattggagaatacactaaaaatcaactagttttaaacggtacgggtgggagccatgccccctctgtactggtccactttataaatcccagagggaactcattctatgcttgaaggaaaactttgccttgttctttggttagattgtgctgaacagatcaattcatgtcaaagagcatcaacttttcttatttatgccatggcttccataccacatcacactttatttactcttagtggaaccttgaatcaatgatcaattttgttttgtccttcagtggagtatcagacaccaggacaacctggtcagcaaatattctgaagtcctcagcagttattactagacaggatattagcatatggcacatcatggaattaatttatgtaacacatacttagcatgcacctatcaaatatgtatcaggcacagtgccacggccttaggatggagaagaaaaaacatagttcttgctctcagagagcttagatctagaagttgatagatgctgttttccaagtttctccacttgtatttctgaaactgtgaacagccaactgacatgtagtaagcaatcatttttccagaaaaagtctgttggggtgaaataacatgataagggatctgagaaaagtaggcagggtagggatggcaatggggaagattccgttataaaggaacagcatacatatagattatatcgctgtatatttgtgtctgtgaagcacctcatttaattagatggtatcatggcaactagaagagtgcttacttaaatgagcggctccatgcaaagccctagcagactgaaagtgctttgtaggtattagctgttattattcctactgctcatcactaatatgtagtaggcactccataaaggtttgcgacatgagtgggtgggagatttagtgctgaaatgtaaacctatacataaactgaatatcacatctatatgaatagagaaccttttacagtacaagcaagagcaagatgttcacattatattctgcaaagaatgatctgaacacttaaacttacaggctccgaaagtgtctctctgcccaacatccctatccatttaaatagaaatggcagtagcagcttcctggtgctgctggtgggaagagccgtggtaaggtgtctcctttctttcactccggagcgggggtgatgacaggagagggaccgggcgggagcgaagtgatgatggtgataatgggggtaactgctgagagcgggagggtgggggccaggaacaggaggagtgtgagcgtgagaagacagtgctcagaagccgacacccaggtgacttctctggaatctccctgctctgaaatgggtaacgtggctcctttctctgaagctccaacacttaaaggagcttcttgttttaagcttcttgtgttaagctccagatttttacaagcatctcttcagagcctggtctccaaagccatccgtccagtcagatcaagagctacttgccctgtttctccatagtcacgaactggttaatgtgaggggaaggcaagaatggtctccatcgtcacgggtttctgccttggtttgaagcaagctccagcagttacatgaacaccagttacggaatgtctacagttatgacaagacacagcagggctgacccggctcacccagcaagggaacaaaggccatccacacgtcagacccagcaattcaggtgaaggaacacacagaacctcctagttcgctggatgaggagtcccccaatttcaccagataatcacacaacatgttttcatatggccacatgcccacagcctcaagaaggtgaagcattttcagagaatgattcctgacactacagaaacattgaccatttagaatcagaagaccctcagtcaaggctggcctcacaggaaaatcaaatgtaatgattcccataatgagttcaagccagacaactgaattatgcatctgacattaaaacaactgggggattgtaggaggaggagaagtttgggaagagagaggacagtgtaatcttctgggagtaaaatttattactgaacattaaaaaaagatctgcaagttaagttgagagtcattttgtttatactcgaaatgctacaatgtcctttgatttgtttatgcaagttttaggggacaagttacgtttttttagcatataatctacatttattcccaaaacactgctcctgagacaatccatcagatatttcctcaaggctgtggaaaaggggataaaaggcatatttttaaaggtgggcgtgtatgtgcaaaacatgtttgttttaaagagatctgaatgctgtagaaataattagccatgtgcgtgaacgaaaataatgaataccaaatggtacaatgtcctgcttgaatcctgtttcagaaacagaatgtgaaggaaacattacgttctctcatccctctcttttctctttcacccttgttacccctgaattttgtaataatcactattacccttttggctatgaatttaatgtctctatatatagagccacacccctaacacagattcttcttgcctctcagagacagttaaatgtctttgggtattgcactacttattctccataggggctcagacatattcactattgagcattttcattagctaaaataaattaaatgtatgtcgtaaatgtgcagcaacactgaagaagctgcgagctacatcttgtccttgggagtcatttacttagaataagtaaagactttctcacttgctagtttcaggcgtcttaccttgtgttattccttacaaatggacagggctgttctagaacccacttcctgaatacagggaaagaccccagtggtgtattgggataatggagacagacaggtctgaatgtgaggtgtggacgtgggcttgtgtgtgtgttttctccactggatttcttcaaacctaaagttgctggatcacatttctaacaacaatttgcctgaccttataggatctcctttctcactgaatatgttacgattagaggaactaagattggctaaaggacttttggaatgagccctggacttaaaaacccgttgaagagggagcaaacaagaggaacagtgttttccaagaggcttacttctcttaaattgaaatatagtcatgttccctggctctgagggcactttctcagagcccatatgtttattcaagcatttgcttcgtgatgtgggaggctcagccagtgtaatcccaggcatgagatgttcaaatgctgaatatgttattcaagcacattatttcccattgacatatgtaaatttaaaaataaaataataatgcaaatttacatattgaatcttgggaatggaaaacacatttccgatgtcactgggtatatctgttcccctactttaaaataggactatagagctgttctctttgaagtcatctctgaccatacagtttaatccagtgggcattaattcagattctgggttagtgtcttgtagaagctctccggtgcttctaatattcagcagatattgagaacccatggtctaatccaatggccattcttagtctttctgtttctctgctgcatttaatataattgatgtcttaattttcttctgtcttttttatttttattttttacgtccataggttttgggggaacaggtggtgtttggttacatgaataagttcttcggtggtgatttctgagattttcggtgcagccatcacccgagcactatacactgtacccattttgtagtcatttatccctcacccccctcccaccctttctcccaagtccccaaagtccactgtatcattgtgaggcctttgcatcctcatggcttggctcccacttatgcgtgagaacatactgttataggatctctggggtgtcaatttttctgatgggaaacttctgtggccgcaacgccttttaagcccaagtttttgtcctgcgtccagaaagaatgaggtacacagacatgtgaagggtgaaaaagaagagttttatttagtgttagaacaactcggaggagtggggagctcctctctataagcagatcgtcccattgagtgttcagctctcagcagagaggaggccctggaaagggtggctcctctctgcaggcaagtcattctgcaggtctctgaagcactcctcttagcagagagggtagctcctctctgccagcaggtcatctctgcagctggttgtcccatcgtctccagctatcagcagagagggtactcctctctgcaactggtcatccagtcccattctctctctgccccctttgtccctggccatcctcctgcctgctgtggctaagcccagggcttttatggacctcagaggggaggaagtatgtgccaattggtccatgggtggccatgggtggacggaagaggcaccacgagtccccactctggtcggcaggactggcagcccggcccccagccttcaggccctccctcgcctgaaggtggggcctaattggggactcccctcttttctgccccggaccctgtcttcctcctgctgccattcatggccccggggcttggccccaacccagctctgagatctgagtgggtgcctggaacggagagaggccaggcagtgggcgcagacacatctgagcatgcagagatggggagggtccttcctggggcgcccaagggtgcaggctgcagagacgcccaggtcctgtgcctgggagggttggccacagctgcacccgggagctcccgccctgacaactcggaaggggcagggctcccgcttgttcctggctcctgcctgcttcctggaatgggaggcccaggtctgcagccgtgggtgcggcagctgcagctgcacctgggaaggcagatcctgcctgttccaggctcccccaagagcacagggagactcggatctacagctgcagtttgggtggctgtggccccaagagggcggggctcctgcttgctctgtggagcaggaggcctgggtctgcagctgcagttcaggtggctgcagtggcacgcggagctcccatcccaactcggaatgaacagggctgccaccagctccatggagtatgcagcaccagccgcgcagccagcttgatggcagcagccactgccatcattacggtgttcagttttccattcctgagttacttcacttagaataatggtatccagttccaaacaggttgctgtgaatgctattattttgttcctttttatggctgagtagtattctgtgatatatacatacaataatttatccactcattgattgatgggcatttgggctggttccatatttctgcaattgcgaattgtgctgctgtaaacatgcatgtgcaagtatctttttcataagacgtctcctctgggtagatacccagtagtgggattgttggatcaaatggtagttctactttaagttctttaaggaatctccacactgttttccatagtggttgtattagtctacattcccaccagcaatgtaaaagtgttcccgtttcaccacatccccatcaatatctatcattttttttattatggccatttttgcatcttcgcccttcttgactacttttcctctctctaaccaaaattatggtaggtgtttgctcttcttgccttttgattgcctttcttggatatttctcccagtgtcagcttccctcccgggtactggtgctgcttctgtcaccccgttcccttacctactcttggtcctttcaggagagttcctgtatgtttatcttagagccacgtaaagctaaatgggtcttactatctttattaacgagctttattatctgcccctcctctagcttagcactctgtccattctgtgtatcttattgcagttgtacctttcctattcccacctgagagctcccactcctttggttcaacccagcttccatcaatcattcctcgagccttgccaattttttgtctctcttccatgtttattgtcgctacctgagtctagaccctctgggaactgagctgattggattgcagtcttctgcacggggagccatggtgtagagtggaaagtgtaatggatgtggagttagaaagatcaaattctggactcggttaagcatttaattaaaatgtcttggccaggcatggtggctcacacctgtaatcccagcactttgggaggccgatgtgggtggatcatttgaggtcaggagtttgagaccagcctgaccaacatggtgaaatctcgcctctaccaaaaatacaaaaattagccgggcatggtggcgggcacctgtagtcccagctactcaggaggctgaggcagaagaaccgcttgaacccgggaggcagaggttgcagtgagccggggtcacgccactgcactccagcctgggtgacagagtgagactgcgtctcaaaaagcaaaaaaaaataaaataaaataaataaaataaaataaaataaaataaaaaataataaaataaaaataaaaatgtctcaaacccataggaccttagtagtgcatatttgtctctaggcctgtttcgccacctataaaataagctgcattttataaatggaataactataaatgaatataaatcgatgtggaatttgcataaattccatatagatttgggtttcttggccttatgctgaaaccagcatttgagactgttggtgaaaagaatataaagaggtggtgtggtgtacatattactgtccgtattatggtctgattgtcaccacagtcctccatattagctttttatatgacccctgctttcccaatctagatctccagaatttttttggtgttttttgaatataatcaaaagtttgttttgctcaagattcatcttcctaaaaatgtttgacaaatgcctaatttgaaaattagtttgctgtcttcaagcttctcttaggaaagaaacgtggtccaaaagaagtttgtctagtatgcagggatttttaaaaactggataacccagggtggtctgcataagttatatgcttttcccccaaagaatttcaaacggctttcctggtatcatttgtccttatgtttctttagttccaggacagttcatactgttcttggcagcttacaaaatgagaaactgaggtattgtaattcagtctacttcccttccaaggaaaattgaaaaacactgtggggaaaatactaacaattatgtgagcctcaactttagattctgaaaaatttattcatggaaagcaaaaattcattactattcccataacattgccaacagcaaagagattatattcagaattaaatacagccctgttccatttcttctttgctttgaaactcagtgtgagacagcagtggaaccttttctgacttaaggccaaattaggtcaaaaacctttgctttgaaccttctgagtcatagaataagcagggaggaggaagaaaatccgtgacctgtgccacgattttttactgaggttttgtgcaaagagtgccgtgggcaggaaatgtaggaagaagagaggacatcacttcttcagtgtttccctgtatgtccagagataggaaattcagacatttgctttatttgctaaacttcacagatgtgagcaagaggaatattagaggcaatgtgtctaaattacttacttcgatgtaatgacttcagagctctcaggaggagaatggtcgcggggaaggaacgagcccaaccaatggcatgcccagagtcagcccttcatctgcagttttaagaagtggtggttggagcaagacgtgtttgcagttacaggaataagcaggagagggcagctcaagttgcccatcaaaagggtgggtgaggggctgggcgtggtgcctcacgcctgtaatcccagcactttgggaggccaaggcgggtggatcacctgaggtcaggaattcaagaccagccttgccaatacggtgaaaccccgtctctactaaaaatagaaaaaaattagccgggcgtggtggcgcatgcctataatcccagctactcaggaggctgaggcaggagaattgtttgaacctgggaggcagaggttgcagtgagccgagatcgtgccacttcacaccggcctgggcgacagagcgagactccgtctcaaaaaagaaaaaaaaaaaagggtgggtgagtattcctgcaggaaggggaagattgagcagagaaaaatgtcatccctttcttatccatggggcttctcctcccccaccaagctcatccatcagggtcgacactgctcttgtttgtgtcttcgcttagaagagcctgctagaagagtggcagatgagtcacctgtcactaaaagtaggtgttcttagtgctggggaaaatggaaggtggcagcaaattcctgctgcagttttccgtaaaattggattaccactactggttttaggtgcccctggttttaggtgctctgtatgtaagtttgtgcaaaagtacagcggcatctgtgggcatccaagctgggttctgctctcagcaaactgaagcaagcccaggccagtccaagggaagatggctgtggaccttccttctgttttatgcagcctagtttgaggcagttcaactgccccagagttaaacagttcaccatacataatagaggacttcgtaattaaaataaatacctctccaccaagagaggagaaaaagaaagatgtgcacagtgtgatgcagaaatgcaaggtgccctaaagtcaaatatgttacaggacacagtgtgcagctgtcagggcctctggccagtctccagctatgctggaggtattttctgtgctctgaccataggctacaagaccacatggctgctgctccactctgtagagtttcttgcatatcagaaaatctgagacctgacatttgtgatgaatatttcttgtacccatcacaaatcagaagaacaacccagagaggatgtcaggcacctgttggtctttcctcttgatctacttgttgcctccaagcaactaaggttctttttagagctctcacccctcaaagtgtagataattatattatcctctaaatatctaaaaactttgtttaaaaggactcgattttgttttctgggaaaagcttggtttaatacaaacaaattccatgtgtaacccagctttataaaatagaagggtccgagtgcggtggctgtaatccccacactttgggaggctgaggcaggtagatcaggaggtcaggagattgagaccatcctggctaacacagtgaaatcccgtctctactaaaaatacaaaaaattagccaggcatggtggcgcacacctgtagtcccagctactagagaggctgaggcaggagaatcgcttgaacccaggaggcagaggttgcagtgagccgagattgcaccactgcactccagcctgggcgacagagcgagactccatctcaaaaaaaaaaataagtgaaataagatagaaggaagggggtctggctttattgtggagggcactgttttagggaggtacatacatgaatatgttcctccgtcagggaactgagggtccactgcactgattctcaaccatggctgcacattgaaatcactgatacccactccgaccctataggttctgagttcagtggcctggagtgtggtgtgaccggcaagacttttcaaaatctttccaggtgattctcctgtgctgccaaggttaagaagcacaggtctagtgtagtagttccccaacctagctgccaatcagaatcaccaaaagagatttttaaaatacagattcctaggtcccagcccagacctacacaatcttgggaaactacagaggatgtgtatttttacagcatcacatgtatttctgattatcgactcaggggaccctcactgtaatgtcctcatgcacgattgtgatcttaaagcataatgcctgtagcagtttttatttatttattctcgtagacgaagctgtttttcactgcttcaagtttaatggccaagtgtgtttgtaattgtggttttttgttttttgctttttttgagacaaggtcttgctctgtcgtccaggctggagtgcagtggtgcaatctcagctcattgcaacctccgcctcccaggttcaagtgattctcatgcctcagcctcctgagtagcagggattacaggcacaagccaccatgcctggctaatttttgtagttttagtagagacgggggttttggcatgttggccaggctggtctcgaactcctgaccccaagatccgcccacctcagcctcccaaagtgctgggactacaggtgtgagccaccatgccgggcctcctgtaattgcttgttaagagaatcagacacctttctgaagccactaaccaaccagcagcattccccattctatgagcgcttttcctttctgctttcttggcacatttctgtcatagacctcgttctcagccttgttgagacacctcctttagtttagtgtggagtattttcctagaacaccgcagccagacgtcccccgttatccgcaggttgatttctgaggccaactgcagactgaaagtatgaaatggaaaattccagaaataaacagttcctaagttttaagttgcgtgctgttctcagtagcatgataaaatctcacgccttaccccatcctaacgcagacgtgaatcgtccctttctccagcttgtccgctgcgcagcgctccccgccggtgagtcacctagcggccatcttggtgcttagatccactgtggtgggatggaagtgcttgtgttcaagtcacctttattttacttaatgatggtcccaaagcacttagtgatgctggcatactgttacaatcgttctattttattattagctattatcattaatctcatactgtgcctaatgtataaatcaaactttatcgtaggtatgtatatataggaaaaaaacatagcgtacatagggtttggtactatccagtgggtttcaggaacccactgggggtcttggaacctattcctcatggataaggcggggactattgtactgaaatctgacaataactctgccatgatgcttcttttgagccacaaagggagccctcgatgtgccttgctgtggtcatttcctttaaattcccttgctgtgatcatttccttccatccagcccagcctgagatgtggagactaccagacagagcctcgtgtgatgctctgtcggcttgagtgtgaggaagcttgtaaatccatgcgttttgttaaaacattatcttctacagtgtcattgagggaagtttcaaatcagctgtgaaagaaaacaaaacccacccatctaaggcattactcatgcctggctgttcctggcttgcattagactccctggctggtcccttcaggctctccgttgagagctttctgtgaagttctttgtatattttcccaaatatgtttattatgggttcattttatcttctacgttggaaacgttatagattgagactcagtcactgccttattgctgcttttcatcatcccacccaccatcccttgggttaaccagagcaaaatagaagcaaactatattattcgcgaaactatagcagggaaaaagatccaagtttctggaacgtgtcctgatgaaaaaataagagtgcatcagatgtggagataaaatgtctcaatgttgaagggatgcatttatctacttaacactcagatgtttttctgatggaagcctctgcttatttatattttagcaaaggccaaactaacctgttctaagaaataatctcatactgaaagagagacctcacttcccatttcccaatccaaagtaaatgctgtgaaagaccaggaatgtagtaccgtcagcacacatctgggactgtttgtagcctacgttctgaaatcaggggatgctgacaggctcaagctgcgatactgaaaggaggcctggtttcccttctgttggaattacattacaaggagaaatattgatccagcatactcaagaatgggctgggtgtggtagctcatgcctgttatcccaacactttgggaggctgagacaggcagatctcttgagcccaagagttcaagacaagcctggacaacatggtgaaaccccgtctctacaaaaactacaaaaattagctgggcgtggtggcatgcgcctgtagtcccagcaactcaagaggcagaggtgggtggatggcttgagcctgggaggtcgaagctacagtgagccaagattgggccactgcactccagcctgtatgacagagtgagaccttgtttcaaaaaaaaaaaaaaaccctgaaattaaaaaaacattcactgggggaaaaattggtttcttagtagaagaataccagcaaaactcaaaatgaaaatggaaatgctctgctgccaatcaggaaaagactgaaaatcttggcagaattctgctggaatcctctgcccatttccttcatgttctcataattataaaagaaaaagaaatgaacattgataaagttcctgctgaataagagaagttttttctacctcacatttgttgaatgcatctcatttagtcatcaccctaaccctgtagggtacgtgttattatctccattttctttattttttgagacagggtcttgttctgtctcccaggttggagtgcagtgccgcgatctcagctcaatgcagctttgatctcccaggctaggctcaagcaatcctcccacctcagcctcccaagttgctgggactgcaagcatgcaccaccacacctgcctaaatttttttattattttgtagagacaggcctcactttgttacccaggctggtctcgaattcctggcctcacatagtcctcctgcctcggcctcctgaagtgctgggattacaggtgtgagccaccacacccagccaattcccattttaaaatgaggaaaccaaggcttgggttcggtgatttgctgtgactgaaaatccttccctccccacaaatagggacaccactatcagatatcacatagatcatttcccaggagccaagggcaaagggcagacccgtctttggccaaagccaaattctttcctacacagtaaatatgggaaaaagagagacttcaagcttcaccccaagagttgagacattttgaagaaagactgacacaattaggggagtcgctggatataggagtgaagtgcgagagaggtatcaaatatcaggctctggcctatgcttggagaaatggtgcaaaaccgttagcagaaatatggaaccggagtgcatgctgatttgagaggggtggtaagcatccaagtggaaattcctcacagactcttgagctgagactgaagttcaggaagaagaacacacctggattttttttcttatgctaggcattatagttgcttttatttcatctcaacaatcttttgaaaacgtattatcatcattcacatattccagatgaggaaactgaggcttacagaggttaactgcatcttccacgtccacagtgctagtatagaaaatgagctttgttgtaaacaggagactgccttactttttttgcatttccgcttgtccattaaatattttattgcctgtttagattacagtcattggtgcctacagcagcattatttatctttcattgggaattagggccttaaattaaatcgttagtcatattttatgtttttataatgttgtagagattctagttagggcatggtattctaaaaaggaaaagcattgatttaatttataatgaataattgtatctaaacagtgtactatgtgttctgcgttcaaataagccagaaagcttctatttataccaaaggaataaacagcaaacaacagacatacttaaattgaaaacatgagcacatttgaattttatttttgaatgtagatgtaattgaccatttgttctgcaaacaaggctttggtccagtttagggggaaaaaaaaatcagtgcactagtgtggagtattttctaaaagaagacaattttagagacttagtaaactttctgaaccggtaagacttgaaatgcctcatgaagggaagtgaggcagggaaacttttaatgagagattattccattcaccatctttgctggagctgactggtgtctatgatgcaggaagtaacctgagaaagaattctagggaggaaaatgtgttttttttttttctttctttcttttttgagacacagtctcgctctgtcaccaggctggagtgcagtggcatgatctcagctcactgcaacctctgcctcccgggttcaagtgattcttctgcctcagcctcccgagtagctggaactacaggcacgtgccaccatgcccagctaatttttgtatttttagtagaaacaagatgtcaccatgttggccaggatggtctcgatctcttcatctcgtgatccaccagcctcagcctcccaaagtgctgggattacaggcgtgagccaccatgcccagcctgaaaatgtgatttttttatgcagatgaaaataggaccacagtgaaggaggtagagaagagggcctttcttagaaaataatcggaacaaccacagccagtaattgtaggtcttgagtacgccaggccctcatctaaattcttcttatgtgtgaactcacagcaagcctgtggggtaggaactagtattattcccactttggagatgagcaaactgaggcacagagaaatgaattagttaggcctggttagtacttagatcagagaaattaattaacttgcatcagatatacacagctgaggagtaaggccaccaggattccaaatcaggtggcctagatcccaggcctgtgctgtttgctgcagcagtcataggaggtagtttgaactggaaagcagttcatcatgagaggtagcattttttgaggcactactgcctgcttgcatgctaggcactgaattgtcccatgcaattctcataacaacttcatgaaataaggcgtattactatcttcatttttttttttctaaggcagagtttcactcctgtcgcccaggctagagtgcaatggtacaatcttggttcgctgcaacctccacctcgcgggttcaagtgattcttctgcctcagcctccctggaattacaggcactcaccaccaagcccggctaattttttttgtatttttagtagagacggggctttgccacattgaccaggctggtctcgaactctggatctcacatgatctgccccccctcggcctctgaaagtgctgggattatatgtgtgagccaccgtgcctcgccatactatcttcattttcttaaagaggaaatcaaagcttagaaagttgaatgggcccggtgctgtggctcatatctgtaattctaacactatggaaagccaaaatgggaggatcgcttaagcccaggagtttgagaccagcctgcacagcgtgatgaaaccctatctgaataaaaaagtttaaaatgtagctagatgtggcggcacaagtctgtaatcccagctactaaggaagctgaggatcacttgagcacagggaggtcgaggctacagtaaactatggttgtgctactgtgtccagaattaggtgcgttcttggtctcactgacttcaagaattaagccgtggacccttgcggtgagtgttacagttcttaaagcggcatgtctggagttgttcattcctccctgtgggttcatggtctcactggcttcaggaatgaagctgcagacctttccggtgagtgttatagctcatacaggcagtatagatccaaagagtgaacagcagcagcaagatttattgcaaagacaaaaagaacaaagcttccacagtgtggaaagggatcggagaaggttaccactgctggctcgggcagcctgcttttattctcttatctggccctacccatgttctgctgattggtccattttacagagagcccagtggtctgttttgacagggtactgattggtgcatttacaatccctgagctagacacaaaggttctccagggccccactagattagctaaataaagagtgtcgacacaaaggttctccaagtccccaccagagtagctagatacagagtgtggattggtgcattcacaaaccctgagctagacacagggtgctgattggtgtgtttacaaaccttgagctagatacagagtgccgattggtgtatttacaatcccttagctagacataaaggttctccaagtccccaccagagtagctagttacagagtgtggattggtgcattcacaaaccctgagctagacacagggtgctgattggtgtgtttacaaaccttgagctagatatagagtgctgattggtgtatttaaaatcccttagctagacataaaggttctccaaggccccaccagactcaggagcccagctggcttcacctagtggatcttcacagaggcagtaggtggagctgcctgccagtgccgtgcgcccgcactcctcagtccttgggtggtcgatgggactgggcgctgtggagcagggggcggcgctcgtcggggaggctctggctgcacaggagcccacggaggggcagggggaggttcaggcatggcgggctgcaggtcccgagccctgcccgccagaaggcagctaaggcctggcgagaaattgagcacagcggctgctggcccaactgctaagcccctcactgccctagggccggcggggtccgccgctgctccgagtgcggggcccacggagcccacagccacctggaacgcgcgctggcccacaagcaacgcgcgcagcccgggttcccacccacgcctctccttccacacctccgcgcaagctgagggagccggctctggccttggccagcccagaaagaggtcccacagtgcagcggcggggtgaagggctcctcaagagccgccaaagtgggagcccaggcagaggaggcgcagagagcaagtgagggctgtgagggctgccagtatgctgtcacctctcactacactccagcctgggtgacagagtgagacccggcgacaaaaaagagggagagaaaattgaaagactttcctaaagtcacgagttatcaaatgccagttagcccggtctaacatgacactgaatcaactatgtgcttcctgctcaggagtcagaacgatattatcaagtgttaatgcttctaaatgcaaagagggagcaaggtgtttcttctctttagtctgtgaccagcagctgctcactataacctctcttccactgcatgtccaaggattactgcatagaggaggattcccatcttcccagcccctaaatttaaaaataaattaaataggctgagcgtggtggctcagggctgtaatcccaagcggtggctcactcccactttgggaggccgagatgggcggatcacctgaggtcaggagtttgagaccagcctggccaacatgatataaccctgtctgaaaaaagtacaaaaactagccaggcatggtggcaggcgcctgtaatcccagctactcaggaggctgaggcatgagaatcgcttgaacccaggaggcggaggttgcagtgagctgggatcacgtgactgcgctccagctctggctactgtctcaaaataaataaataaataaataattaaaagaatatagaaccgccctcacacttcctgccggatgcagtcaatttgacagtgtgcctcattcagagggtgttgcctacatccagggagtgtcaatttttttttattgaatgaatacctgattaagttaatgacgctgagctgggggaggaggagcagtttggcagcccaatgctgaagggcttctggcagctcattcagtgtccttaatgttccattggctttgtgctgggccgcatgtgagccccaggagaggctgctgtaattactcagcttttttattgaaaacagctgcaggtagcgagtcatcccattgtccatcttgctagtgactggaaacaactcggggccatcttgggctccactacactgcagcctcattctgaagtcagtggaggtagaaagtaggcttcccacttgctgggcttttcaaaatgagccattcatcttttgagggtcagaagtcagccacccattcaccgagtgtgagtcatacccctaattttaaaacaaacatttattgcagagagaattcttatcttggccgatgtgtacagctgatctccttgtccttcctacgattgatttaggctggtttcaacaaaattgttgtctttgtaaatacacacctcttccagtaaatccagagactaccgaggtgtttccttgagattgagcctaagacaatctttaattagttttggataattggatatgaatgtttagaggccttcccatatagcaagtgtctttaacatctcacacaatatattatacttgtacttcctgacccgagaagtaacaggagttaataatctcacgtgagaaagtatgtttgaaatggaatctcaaggggcagattctttgcagataccacaacattattttatgtccctccgtaatgagttcagttttttatcatcacatccaaaatctagaaaatgatccagaaatcctttgccttttaataaccagcttgtaaggaagacaaactgcaagagatggacacaagataagaacagtaaccaaccaaggacggacagcaccctagaaacccaaggggttgtgaacttcagtctctaagcagcatcggagtttacggtctaatgacgaaaacacgtgaaaacaaggattgcagcagccggaagtggctttgctgagagtttaggaatgattgcctaaggaagtagcagttaggggacccactgtattagtcagggttctctagacagacaggactaataggatagatgtatatatgaaggggagtttattaaggaatattgactcacatgatcaaaaggtcaagtcctacaataggccacctgcaagctgaggagcaaggaagccagtggttgaccagtctgagtcccaagacctcaaaagtagggaagccgacagtgcagccttcagcctgtggccaaaggcccaagagccctggccaaccattagtgtaggtccaagagtccaaaagctgaagaacttcaagtcgggtgttcgagggcaggaagcatccagcacgagaaaaagatgaaggccagaagactcagccagtctagtccttctacgttcttctgcctgctttcattctagcctcactggcagctgattagattgtgcccacccagattgagggtgggtcttcctctccaagcccatgacccaaatgtttatctcctttggcaacaccctcacagacacaaccaagaataatactttgcatccttcaatccaatcaagttgacactcagtattaaccatcatgcccaccatggtgaaggcatgcgggggtggctggtgttagactaattggagccttggaggatagtcgaggaaacggttcctgaacggtgtgtggatgagaatgttggagcagggtgctaaggaggcacagaggagaggcagagggtatggggttggagtggggagagccttaaggaggtgacatggaaggagagacctgaaagatgggtgaggccagtgcttctggaagtgtggttcctggaccagcagcatcagcagcatctgggaactccgggtgaatgtgatgcgcacgctcgagtataagaaccactgcattagaaaacaggtgacagtgccttgcggaggagcggtggctggtgtggaaagtactctaacagagcagagggaacacatacccagaggcctgcagcaggcatatttgaggcttgatcaggacacagccacccacacccactggttacaaattatctgtggttgctttcagcctgcagaggtagagctgagtaatggccacagaggtgtatggcccgcaaagccacacgatttactaggtggccgcgcatcgtcaaggttttccagtccctgattcagagggtggaactgacataacctgatgacagaatcaggggagaagaggcatacagggatatcggccagctttcagtcttcagtgagcaatgacatgatagagcagtgacactaagatactgctgcctcactttttacagctcacagtcccctttgcggatgtgagaaagggcatacagctttaagggcttaaaggatgccctgacgtccagtcctggaatacaggctaatgccagcaggtatctcagagatccttgtagctccaagcagatgagggagcggggcgctgtgtggtttcaaaacagaaatgcagtttgttcacaaacttttaagatcatgacatatttatttatttatttatttgagacagagtctcgctctgtcacccaggctggagtgcagtggtgcgatctcagctcactgcaagcctgcctcccaggttcacgccattctcctgtctcagcctctcgagtagctgggactacacgtgcccaccaccacgcccggctaattttttctattttttagtagagacagggtttcaccgtgttagccaggatggtcttgatctcctgaccttgtgatctgcgcgcctcagcctcccaaagtgctgggattacaggcgtgagccaacgcgcccagccatgacatacttatttttaaaaatttttgactggtgacaaaatatgcataatatgaaatttaccatcttaatcatttttacgtgcacggttaagtggcacattcttgttcaaccatcaccaccatctgtctccagaatgtttccatcataccaaactgaaattctggaaccgttaaacaactcccattgccccgtcctcccagctcctgctaacgcctgttctacgctctctccaaatttgactattctagattcctcatagaaggggaatcatatgatattgttcttttgtgtctggcttctttcacttagcataatgtttgaagatttatcaatgtcatagcatgtaacagaatgtcattcctttgtaaggagagggggatgaataatagctcgtcataaggatataccacatttttaaagtttattcatctgttgatgatcattgggttgttgacaccttttggctcgtgtgcacaatgctgctatgaacacgggtgtggaatatctgagtccctgctttcagtgctttgtggtagatatccagacgtggaattgctgagtcatgtggtaattctgtatttcacattttgaggaactgccaaaatgttttccatgcagctgcatcattttacgttcccaccaacgatgcacataggttctcgtttccccatctccaccaacacttgctattttccatttttgttttgtttttttttttaaaaaaaagaatataatgtccatcttaatgagtgtgaagtggtgtctcattgtggacatagcatataattttaagtatgattaaaggaggttagaacacgacttttgtgttggcaaagtggggaaaaggattggctgctgtaattaaaatcactgagacaggccgggctcagtggctcacgcctgtaatcccagcacgttgggaggccaaggtaggtggatcgctcaggtcaggagtttgagaccagcctggccaacatggtaaaaccccgtctctaccaaaaataaaaataaaaataacatagccaggtgtggtggcaggcacctgtaatcccaactacttgggaggctgaggcaggagaatcacttgaacctgggaggtgcagtgagccgagactgcacccattgcacaccagcctgggtgacagagcgagactccgtctcaaaaaaaaaaaaaaaaaaaaaatcactgagacatactgccaaggacagatggagttagggggcttaaagatcctctataccagccgggtgcggtggctcacgcctataatcccagtactttgggaggccgaggcaggcagatcaagaggtcaggagatcaagaccatcctggctaacacggtgaaaccccatctctactaaaaatacaaaaaaattagccaggcgtggtggtgggtgcctgtagtcccagccactcgggaggctgaggcaggagaatggtgtgaacccgggaggtggagcttgcagtgagccgagatcacgccactgcattccagcctgggggacagagcgagactctgtctcaaaaaaaaaaaaaaaaaaaaaatcctctataccagaggttctcacctctggctgcaaattagaatcccctggtgcatttcctaaaatgccagtggtggtcccaacatctagggattcttattcagttggtctggggtagatctggacattatgtttttaaaagctccctgggtgagtctgatgtgccgtcagcattgatttcttattctgcaggtgagagagtatggccctagtactaaggctgcaagggttctggtctctcagccagagctgctgccactgatacaccattattcagcatgaccacaaacacagtgaaaccagtagtgtcccaggtacatgtgcatcctcctttgtattgtggaggaaatatgtccccaaaatctgcagagccaagtgcgggagccaactcctccatttggtctgttgggatgttcagtattctatggtagatttctagtaagtcaatttcactcagtgggctgaggatattaagacaccggaagttagctgatgtgttcccccattgctccaacactttgaactctgtaccccaaaaattgatccactcagtgcttcttacatgtatgtgccattggggagatttccacagggaggctttctctgagcctttggccctggtgacattacactgagtaatatatatccctgttcctttctgtaccacccatctgcctgttccctggccacagtttggggtataccaatttagattaacctaattattgtttcacaaggcattcttatcactgaacgctgatggatgttacttcaacgttgttatattttattacttggcctatttaagtgtataaccatcactagctataagaaggtgaccaactacaacgttagagagagcagtgcctgcaccacgaattgcaagttcagggggtttcccagaccaccctccgttttgataattcagtaaaaggactcacagaactcactgaaagctgttctactcatacttattacagggaaaggatacaagttaaacttagccagggtaagaggcatataggagaggtctagaggggtccagacatggggcttctgttgccctctgcccatgaagtgatgaacagcattacctcctcccagccatgatgtgaagaatcaccaaccagggaagctcacgcgaacctcagcatctagagtttttattggagctcaattgctactgtcctcatgactgacctctagtccctaggccctcctggagatcaggcaaatatctttcattattagttcctctgaggttggaacgtatacctcatggcccaaagcccccatcataaatcacattgttactccatccagtggccaataaacatacttctgtgaggcaggacattccagaggccgagagatcacctccccacaggtgggggcaaaggccagacctgagtttgggtgaggttaaattcttcatggtcaggcgcggtggctcatacctgtaatcccagcactttgggaggccgaggtgggcagaccgcgaagtcaagagatcgagaccatcctggccaacatggtgaaaccctgtctctactaaaaatacaaaaattagctgggcatggtggcatgcgcctgtagtcccagcttcttggaaggctgaggcaggagaatcgcttgaacccaggaggcagaggttgcagtgagccgagatcacgccactgcactacagcatggtgacagagtgagactccgtctcaaaaaagaaaaaaaattcttcactacacactaatgacccactacacaacccaagaactagatcccaagttttcatattaggattttttgtgtgttgtttctgcccttttttagccatgtaatcttaggcaagtgacttacactctgagcttcaatgtccttgtctttgaaatggggtgatcatatgctagttgttatttatatgtaaagcattgctgtagcctgcacaaattaagcatcgtgacttgtcctgcctgctgtgccttagagagcctgggtcccgggaggtcttggggtctttgcagttgagagcattgaattgtgcagtgtctcagtgactgaaaccaccatagaaggtaagccagtgtgtgacacctggaggaacagctggttagtttatgaattatctggaggcattggctttgctttcattcagccacaccaaggacagtgaatagttttaagactctcccagagtacctcagttcccacgagacctttttcctgacttgatggagagttttatgttctctgttgtagactggggctgtctaatgtcctggaaacccagccccctggtggctggcaggatccagcctaggcctcctggagcagttgctggcgctttgcatcgtgttgtgtggtgaagctcgtgagtgtgtgtgcgggtagacagctggcagccttccctgcgggatgtggaaggaggattctgcatttccccaccatgcgtcttgggaattactcatccaaaaagtattgtggaaaagcaggcagagtgaaacacggaggcattgcacttaacccttccctggaaatgccatccttgagtttagcgtctgagctttctgtttattctgcttgtgtgctgaattgccttccttcttgttggtgtgcataggggtctgcacattgggcacttataaatattatcccacctatcaagtgaagaaaaaaatgaactctcaaacacccatcacttcctctttttctatcacagatgtgaggaaaaaacagatgtttgaaagaattgatagtttgaaggtgttgtattgattacatcatggccaggagagatgagcaacagataagtgtgggtgatcactgagaattcatgaggaaatgtttattgaattataactacgatggcgaccatgtactgagtgtgtgttatactaggcactgtgcatgttaattcttccccattttaaaggcagagattacaactttacacattgttgaaatgaaatttttgcctcattaaacttgggcacatgtataatcgcaagtaaaattaaaattattattttgagatggagtctcgctctgtcgcccaggctggagtgcagtggtgtgatctcggctcactgcaacctccgcctcctgggttcaagcgattctcctgccttagcctccctcgtagctgggactacaggcgcctgccaccacgcctggctcattttttgtatttttagtagagacaggatttcactgtgttatccaggatggtctcaatctcctgacctcgcaatccgcccgcctcagcctcctaaagtgctgggtttgcaggcatgagccaccacgcccggccaaaattatatttttaaaaatggataacataggtggtttggggtaaagccaaggtttgaacctgttctctaccttacggcgtagcccactctaactacaattctgtgtgtccttagtagtaatagcagtggaatattattgatctattatcatcattgttagtaataataatattaatatttatcttgatattctaaataggacagtggatgtgaatgcttcatgcatcgggtagtgagatctatcacagtggtggtaagaaacattcaagtgagagtcaaagtgacaggttctcatcctcctgaccccagttcttactgtgttaccttggccaatacttttcatcttcttgcatcagtccttgaaataagataatgaagagggctcacttcctctcactttgaaacaagttagtctggactgggatgagaaccactaactccaggcagcgtggaaagcatctgtgtaactgttcccagccttcaaccagagtggtggataaacagaaacgtgggtgcccccgggtagctaacctggaatgcactacgctttaaagcaaaaaagtatttgcttctgtattgaatcaggaaaggtcttgacagaaaggcatttccagcttttcttaaaaactccaactcaacctctgtcagacaattcatttgggaccagcttggatccagatggttatttttccatcttgagcctttccaggaattccggcatgggcaggccgccagagacactggctacacagccactgcagcgcgttttccatgtgagccggcttctagggatggcccagccaagctgtggccccgcccctcctccttcctcatccaggctgatcctccagctctcacggacatgtgccatgagccacgcagggggaccccagccacatggccgatgtcctgatgtttccaggggtggcagagctcactaactgcacccccagaactgtcatctgctcactacgaatagcaatggcagaagccaggaatctaagaattgatgaagcctggccctccattatgtggacaggtagtagcaaatcactcagccccacttagggataagggagacagcaacttaaccacgtgccaagcagacaagttcagcagaatggcagccagtgcagctgtgtgtcttgaggaattctttccagcctccccttcaaggcccttaatcaaagaacaactccccactggacgcagagctacccaagccagcgaccacccgaatgagactattattttgggtggatttaaattttttaatcattgcttcaagtatagtcgtatccattgcccaaaaagtctatagatgcatggggtcaaaaaacactactattcgtggtgctgataatataagtagtggggctgcttttctcctgcctttgcttgacccactgcagtcccagctggcagtggtagtggcagattcccctgacccaaccacccccaggaaggtcttgcctcaaagaaaaggaaaatgtggtgtgtgctgctggctgccacggactcaggggagcctgtgccaggttgcaggcttgaacttgcttcttgtgacactagagggagagagcttgtttcaaaagcatgttagtgctctcagttcctcacgtccgacctgtgccagaggctccttctgcagtctcaccactcctatggcctggatcacaattgggtgggtggtcttgaacttggctgctgagcctgaggtcccctgcttgcttgcctgggaaatacaaacatcctgacctctcttccttggtcactgatcagtctcttccttactgaacgtctcaccagctgcagttcttgattagtcaacatggtgcagaggtcccctagacatcttttcccctacttatccctgtgcattctgtcccttttctacatgaaaaataaataggcatatttgctatgaggctgccatcgccatagccaggaggtgagtgtaacccgcatcatggttgggtagactaagaaagtgatttccagtgctagttctacctctgactgtatggccttgggaaaacctcagtgtccttatctggaaaatggagataataatacaaacctcacaaatttgttatgaagagtaaatgagatatttaagtaaggttcttggcatgtataataagtaatcaataaatggaagatatttggattggtttcttagggctgccataataaattaccaaaacatatcgtggcttaaaacaacagaaaagtattctctaacactcctggaggcttgaagtctaaaattaaggtgctggtggagccatgttcccttcataggctctaggggataatctttccttgcttcttgctgcttctagtagcttcgggtgatccttggcttgggactgcgtcattccagtctctctgcctctgcctccacagggcctttgcctctgtacatctcacatctttctctgcctttctcttataaggacatttgtctttgaattgagggcccacctggatcatccagcatgatctcatttccaaatccataattacatctgcaaagaccctttttccaaataaagccattcccaggttctgagtgggcataacttttagggatctaccattcaacccactgtccttccttattcatgataaaaattaagatacataaaattatttattttttatgtccttaggccctcgtgtggactccttctagcttggattacgagctttcatttcttgctttttctcttctcactcactacacttccgtgaagagcaagatcccatgtcccaggggtgcagagccgagaagggaaacccgagcgcgttggggcgaggctctcagacagcatcttctacaaagttgtgccaggtcccagctcgcctctctggtggtttctggcctggatgtctctagacagggccttcagtccccttcaggagcctcctcattttgggccaagaggcctgccccatgaagctccacgcttagatagacatggaagagaaggtcaatagtcagtttccactgaggacacagcaagaagaaattgtgacagtagactgggatgacaagccagccaccttgacacagagtggaatcacagtctcagaatgttcctaatggcaaaaaaatgtagagtaagtagttcgaacacccaaccagggcagggacccctaccccatatccctgagtttctatcctgacccttggggtgacccagagatccctgactcatgaggcagcccagtccatttttaaccattctcattgcttcctaatgctgcagctttttctgttcttccccagggcactcattcccagttgtctcagctgttactcatctgcttgcctccagacctcttgcgcaactgatcactccccctagacatgccccatccttcccacgtgcctttgcagcaggatttcaactgtggctttacccgtgccatctatggttgcagtatttattcccttattctgaacattgttttctttctcttttcttgagacagggtcttgctttatcacctaggctggagtgcagtggagcaatcatggctcactgcagcctcaacctcctgggctcaagcaatcctcctgccttagcctcctgggtagctaggaccacagatgcaaaccaccatgcctagctaattttttttattttttgtagagacaggatctcgatatgttgtccaggctggccttgagctcctgggctcccaaagtgctgggattacaggtgtgagccactgaacccagcctgaacattatattttttttaatgaaggttataattactatactttttaagaaccctaccaaatggttgttcatattgagtgtatagtcaaacaaaaactttctgggctctttcattgaaaccattattaaaccagatctcttcaaccctgctagtaggctaattgagctgttgaaaccaagggcaggcatttacatttattctcattgatcttaattttcctggtttggtaccatcacttccggcttcttaagatatatttgaatcttattcgcaacatatatcccttctagccttctgttacttcgaaatatgataaccaaaacactgtattagtattgaatagaacagaactaaaaatagagttctggcataccatttgcttcacactgacattgaacaattgaggtccccgtcatacatactagaaacggaatgagtgtttgatgaatgaatgtgtgatccactttgggggcatgcctgttcagtcaaccataaaggcatctaattatagctatcatccaatccacctttctccattctagatactccaagcatgtcgggtttggacctgtttttaatgcttggccaaaatgaagtgctttctgccagtgcaccacacaggccttccagtttagtgatgtaataaagctggaaggagattggtgagtcagcactttgagaatccttgacatgcccaagtaacctctgtcctcacacccaggtattctgccctcttcagtgtttgcatacgtagtttttccagtcctggcacaagctcatcagcctgctcttcctcttctttaaagctgaaaccgtgccctgtttgtccatagatatacaggccaggcagccatgggttcattcaaactgagaagcacaggattgggggtgtaggaaaagcaacccattttcttgccctaggtttaagatgtatttttaggagtttatatatcaaattctaagagcatcttccattctgagcagttggctgctatttactggacttgcagtcagtgggcatatattccccacatccctagcacagaagcatctcattttcctatcacttcccaagcagtctgaatccatggtaatagcaaaaaatttctcgaaatgaaattatagcaaagaaagaagtgtggagcttcctttgttaaatttcatttttcttcctgggaatgattgagttgtgtataaaatttatgataatagcctttttaaagtatatttctctgcagttgtgtaaagaaccagaagaaaagcagcatttgttatttgcagccgtattaggtttagatgaccccagaggaagcagtggagcatcacctaaatattagatgtttatctccgaggctccatcaactctgtgtttacgtacaacacctagtttggtttcccagtgcctgctccattaggaagaggctagagatgtttaatttgcttaagagtttagcagtagaaaatttaatcggatagctgctagggtttctcaaaccttactgtgcatagaatcatctggatatcttgttaaaatgcaggactgggtggggcctgagagtctgcatttccagcaaacttgcagaggatgctgatgtcacgggtcggaggaccacacttcgactagcaaagccttataccactgggctaaatttagaaattatgatagagagatagttaatgtagctctaaagcggcttaagatgaatgtattcagaacagtgattatcaggcaaaccatgggtagcaaactctaaatacatttgtcttgattcatctattaactctccctccaatttcccttttccaataggaatgtttaaacagtgcgatctgcatatgtggctctctggtaatttggcattgatataattgtgcatggccccatgtttggaagaaatctttttgttgtggcaggtgcttccagagataaactcctcgggggtcccctgggagggcaattcaggacacagaggccagttgtctgcaactagagactctaagagcagaaatcccactctccttttttcttttttcttctttcgtttctttttctctcttccttattttccaaatctacttttccaccttcataagttacttctttgttgtttagtcccatgatcacccgatagaccaggaatgtggtgccatcctggggcgccctctggtggttcattgaaaatacagcaagacccaatctctacccgtgggtttccccttatcagtactgaaagcttacggggcccagagaagggacacatacctcagcgttagagagccctgtctgctccgtgctgcactggtaaatagccctaaatgtaggaggaggatgggtggaaacttttatcggtttggccccagctcgctgcaactgctgtcttaatcattgtgtccttgatttctcattggcaatctctggaaaagatgctgtttatcaatggataagttttcagaagaataaatttggatttgtgtgttaaggccaatatgtcttagcaatcatttcgcagaagaccagtccagtgagtcttcagggctgactaagccgatgtctctcaaataaacagtataattaaacctgagcactactgagaaccaagtcagcattctttttcaaatttacgaaagctggcttcctaaagaagtaccttcagaggagttttctagttttgtgtattgtgcattcaattgtacaggcaatgttacatttgcattgctaatagacccttcctgaatgtgtttgacattttacttggctttgaaaggacttttatgccgctgctttttcttccctagtgctgccttgggctaattaacctattcccttactggctgggcctactatatgcaaatgttctcattttgcattctgacacatcactcttgcataaatatccctcatgaaaccctgtggggttttattggatcagtgctgcaggagggccagcagggggcgcatggactggttctctctgagtaggtctcacgcatgagttttccttgctcgttggtatggaaatgtgggagcgtttggcattccctttcttaagagtgagtcttgaaatttaaagataaaagttcattattagaacttctttttacaagggaaggctgtacagaacacagttatttgtcacttacaaaaaccctaggtgggcagggcgcagtggctcacgcctgtaatcccagcactttgggaggtagaggctggtggatcatttgaggtcaggagttcgagaccagcctggccaacatggtgaaactccgcctctactaaaaatacaaaaattagccaggcatggcggcagccgcctataatcccagctactcaggaggctgaggcaggagaatcgcttgaacccgggaggcggaggttgcagtgagccgagattggcacattgccctccagcctgggcgacagagtgagactccatctcaaaaaaaaaacacctgggttgcgagagtaaataagtgacattactccttcaacacttcatttcttcagcataagtgttttagggtttttttaaccttatttttcatttccgtcccagtctttaagcgcctctcttgtcatatgagaaattctattcttactgaaatgtcctttgatatcgagacaccaaatttctaaacctgcaccttcctagatatctgatcaaaatcattaaggattgagaactttctgttgtatcatttgtcatttcattatgatgttcattgatgatgttggagcaaaaccaataagggccattaaatcattgccccttccaagctggctgcagtggctcatgcctgtaatcccagcaccgggaggccaagtgggtggatcactgaggcctgttcaagaccagcctggccaacatggcaaaaccccacctctacaaaaagtacaaaaattagccgggtgtggtggcgtgcacctgtagtcccagctacctgggaggctgaggtgggaggatcacttgagcccaggaggcacaggttgcagcaagccgagatcacgccactgcacttcagtctgagcaacgaagcaagaccttttcaaaaaaaaaaaaaaaaaaaggaaggaaggaaggaaaaaaatcattgccccctctaaaaaatagttacaaagtagggggcagagtagagaaagggggttatgtttcagtagggatttcagtgttgctccaacatggacaaggattgaatgctgaaggccgctactttattgtgtttgttttaaaatcggatcattggctacacacagtggctcatgcctggaatcctagcactttgggaggccaaggaaggaggatttcttgaggccaggatttcaagaccagcctggttaacatagcaagaccccatctctccaaagaaagaaagaaagaaagaaagaaaatcagatcattgaaaagagggtctggatgtgagataccaaaacccaagggtgtggaattcccaaagcccaatcccacagctctcagaatcacagcatgttgcactgtgcatacctacagctgctacctgtggaagcaatcacatccgctgcttgctagcctgggtcatgtcagttccactgatatttggcctcttgtctgttgggcattggtttgcccacacagcagcagtaactcagacttcagtggttagtaagagactgagatacttgaccataagaactggctccagggtcaccatttgtatgtccaggtttgaacacactgatctgatttgtctgaaagagctgtcgtctctagtgttaatggcgagttgttactttccaatgagaaaggggacggtgtgaaggggaacttcaatgacaacttgaaaaggaagagagagatggacaaaccaagcatgtaacccactgagaaaacattcagtgcactagccctatttttgtatggtatttgggttttttaaccataatcaaattcggtttttaacagtctcactccgtcatcatatgagtggctgtactgggaattcttttgaaacttgcagagaacaggattatttctggcggcctctgctgagttggcgtgtgtgtgtgtgtttgtgtgtgtgtgtattagggagaggaaatcgtaggtccagtgtggacccagagctaaggggaatcttggagagtagtggctctggcagatgaggattcagaaatcgagtgcaaggactgttctggactttcactgctaacctgctttttctcagtgcctggctctgagggcagggtccagctggtgtcatgctctccaagggcttcattttatgttccagccaggcaaaggagaggtgagaaatggaaccaacatttctgaaaaggaaatttaagaactgcatcatctgcccttgaagaagaaaaggagaaaaaaaaacaggagagagggtattgagaacatcttaggggagttgttaactccattaaaaaatatatgtgttacagtgttcacttgcccagtgtcttcataatcttcctttataatgtgcagctgccacggctagtgtttttgtttttgttgttgttgttttgtttcgtttttggagacagagtgtcgctctgttgcccaggctggagtacaatggtgcaatctcggctcactgcaacctctgcctcctgggttcaagcaattctcctgcctcagcctctcaagtagctgggactacagccgtgtgccagctaatgttacaccaggctaaatttgttttttattttttatttttggtagagacggggtttcaccatgttagccaggatggtcttaatctcctgacctcgtgatctgcctgcctcggcctcccaaagtgttggctagtgttttctctgcttcagtgcttggggtatgattgggttatgggagttcacaccgagtccagggcctagtcttaatcttgccaaagatgttctttccccggtgctcatgttctgatgtcctttccctccttccctttctcctccctttccttttccctttgtcactgccctcttccctttcccagcatccagagctgctgttggcggattgtacccacggggagatgattcctcatgaagagcctggatcccctacagaaatcaaatgtgactttccgtttatcagactaaaatcagagccatccagacagtgaaacagtcaccgtggaggggggacggcgaaaaatgaaatccaaccaagagcggagcaacgaatgcctgcctcccaagaagcgcgagatccccgccaccagccggtcctccgaggagaaggcccctaccctgcccagcgacaaccaccgggtggagggcacagcatggctcccgggcaaccctggtggccggggccacgggggcgggaggcatgggccggcagggacctcggtggagcttggtttacaacagggaataggtttacacaaagcattgtccacagggctggactactccccgcccagcgctcccaggtctgtccccgtggccaccacgctgcctgccgcgtacgccaccccgcagccagggaccccggtgtcccccgtgcagtacgctcacctgccgcacaccttccagttcattgggtcctcccaatacagtggaacctatgccagcttcatcccatcacagctgatccccccaaccgccaaccccgtcaccagtgcagtggcctcggccgcaggggccaccactccatcccagcgctcccagctggaggcctattccactctgctggccaacatgggcagtctgagccagacgccgggacacaaggctgagcagcagcagcagcagcagcagcagcagcagcagcagcatcagcatcagcagcagcagcagcagcagcagcagcagcagcagcagcagcacctcagcagggctccggggctcatcaccccggggtcccccccaccagcccagcagaaccagtacgtccacatttccagttctccgcagaacaccggccgcaccgcctctcctccggccatccccgtccacctccacccccaccagacgatgatcccacacacgctcaccctggggcccccctcccaggtcgtcatgcaatacgccgactccggcagccactttgtccctcgggaggccaccaagaaagctgagagcagccggctgcagcaggccatccaggccaaggaggtcctgaacggtgagatggagaagagccggcggtacggggccccgtcctcagccgacctgggcctgggcaaggcaggcggcaagtcggttcctcacccgtacgagtccaggcacgtggtggtccacccgagcccctcagactacagcagtcgtgatccttcgggggtccgggcctctgtgatggtcctgcccaacagcaacacgcccgcagctgacctggaggtgcaacaggccactcatcgtgaagcctccccttctaccctcaacgacaaaagtggcctgcatttagggaagcctggccaccggtcctacgcgctctcaccccacacggtcattcagaccacacacagtgcttcagagccactcccggtgggactgccagccacggccttctacgcagggactcaaccccctgtcatcggctacctgagcggccagcagcaagcaatcacctacgccggcagcctgccccagcacctggtgatccccggcacacagcccctgctcatcccggtcggcagcactgacatggaagcgtcgggggcagccccggccatagtcacgtcatccccccagtttgctgcagtgcctcacacgttcgtcaccaccgcccttcccaagagcgagaacttcaaccctgaggccctggtcacccaggccgcctacccagccatggtgcaggcccagatccacctgcctgtggtgcagtccgtggcctccccggcggcggctccccctacgctgcctccctacttcatgaaaggctccatcatccagttggccaacggggagctaaagaaggtggaagacttaaaaacagaagatttcatccagagtgcagagataagcaacgacctgaagatcgactccagcaccgtagagaggattgaagacagccatagcccgggcgtggccgtgatacagttcgccgtcggggagcaccgagcccaggtaacgttagccagggtggcacagggatgggacaccacaccgtgatgccatcatcatctcctggcaagacgaattgcttctatgaggcaggattaagggttctcgggtacacctagaccttagactcggcctttcccaactgcgttctctagaaaaaataagccccatttccccgtgatctctgctgtgtgtaatgaattaacctccatgcatggagagtggggctagttatggagtccttgagacaatccagaaactcaccactctagttattttttgaattctgtgattaagatgaggaaccctgattaggaaacgctgctggacttcaggtccttctagtggtcattcggcactttttcttaccaggaaaagacagaggatgccgttggagtgaggggattagatgctaaagcaatcatatcccattgcaacatccatgttttaaaatatgtcttattagctgggtacagtggtatatgccttcggtcccagctactccagagactgaggcaggaggatcacttgagcccaggagttcgaggctgtagtgagctatggctgaacctgtgactatcactgcactcaagcctgggcaacatagcaaggcccggtctccaacatatatataatgtcttattatttaggtatgataaggccaacagatagatcagcagacaactctctttgacgagataatttttatactctctgatcccaagaggaaagggcactctacaccaagaggtgtagaacaccgtaaagtggggggcacctggggaagccccaggtgggtcaggaggtggagggagtgaggggaaatgtggcaaacaacagcctttattgtggtttcatgggaggcagggtaaacgggtttaggattggttagagtggataattccagtgtgctctggggtgtaggggctgtccttagttgtctggctgctggtgctggggtgatcaatacaggtggaagggctgggcacagtggctcacacctgtaatcccagcactttgggaggctgaggcgggtggatcaccagaggtcaggagttcgagaccggcctggccaacatggtgaaaccctgtctctactaaaaatacaaaaattagccgggcatggtggtgtgtgcctgtaatcccagctactccagaggctgaggtaggagaattgcatgaacccgggaggtggggattgcagtgagccgagatcaggccactgcactccagccttggacacacagcaagactctgtctcagacaaaaaaaaaaaaacagatggaaggcagccctaagtgtgatggaccaatataggaggctgctggggagtgggctctggactggttagtttgcatatgaaagtcaggctcctaggaattagctctggactggttggtttgcatataaaagtcaggcctctaggaattagctaatcctaggagagactatacctctgggatccacaagacactaaaatatcaaagcatcagaaaataaaagcgtggttaatacaatctgagaagtcagggctgtcccaggtgacctgctgggcttggggtaaagtcagctgtagccaagatgagtcactggaagtatggttaacgctcttaatttccacaggctccttcaatctacccttttccaggttcttagatcgattacatgcatttattccacagcccatttctttcactgcccaagttgctgggagtccagcaggttcagcctgcagctgagagctttcctggctatcgagcgtactttctacaagtgtttccatctaggatttgaaaacattcaaatgggacagagcctccttccagcttgagttgaaaatagtcatgaaatagctgctatttgggacattcagataaaataaaacaagaaaaaaaagataaactaattaatggtttgaattgttttgggcatttttttttttcatttttgagacagtgtttcttgtctcctaggctggaatgcagtggtgcaatcatagctcactgtggccttgacctcctaggctccagcgatcctcccaccccaacctccctagtagctaggaccacaggtgcataccaccatgcccagctaatttaaaaataaaaaacattttagtagagatggggtcttgctgtgttgcctaggctggtctcaaactcctgggctccaagcagtccttccacctcggcctcccaaagccctgagattacagacacgagtccctatgtctggcttttttgagcatttcttaaatgcccaagtgaggaaaggaccaaatcagttttccagaaccactcgtgaatgactggatatgggggcttgcacaaagccggggccctgcattgccgagagcttttagccctgaatacttttctttgtattatgagatgtcactgtaggtttacagtctttggaagggcccaagaaagatttccccaaagatcttatttaaaaaaaaaagaaaatcaggatttttaaaataaatggcataataatacagctcactacccctctgtagtggctgttcacttcctgcatgaattaggggtgggtactaggagaaagaaaatgaactaccttgagcaaagttgactcttcacagaccccaggtgacacatggaaaataaacatgagtgaagagtcattgcttttcatggtacttagaatccttaacacatttttgtgaacagaggcaggtgtgaaaagaggttttgtttagaaatgcgactggttccttgccggccagcatcaacttcagcttgagaatgaaggcagccacttcagctgtgggccacacttcccaggcctggcagcctctgcagaaaccagactcttctattttttttttttttttttttttttttttttggagacagagtcttgctctgtcacccaggctggagtgcagagtgcagtggggtgatcttggctcactgcaacatctgcctcttggttcaagtgattcttctgcctcagcctcccaagtagccgagactacaggcacacgccatcaccccctgctaatttttgtatttttagtagagacagggtttcaccatgttggccaggctggtctcgaactcctgacctcaggtgattcacccgcctcagcctcctaaagctgggattgtaggcgtgagccactgcgcccagccccttacagccctcttctgttcttggggaggaagatctaggtgtgtttttccctactccaaactttgcaaaattaatgattaaatgaaagagaaattggcttccctgtgaagtcagagccctgttctcatgttttttcccatagtgagatcactaaatctctctactgacagccagggtgcagacgagcaggtagaagtgttgtcagggcctgttggcaggtctgtgaggttggcccccgcgtggctatgctgcatgccgggaagggcttcctcaaagaaaggcaagtgtgctgagacctgctgaaaaggcagctagggcttcacgctgtagaaacaaaagtgcaaggcctgacgcaaccaatgatttgtcactttaccgaggagcctatcagaaatcggctgacatcatcacagctaaaatactccaccagctgtgtttgccacaagtgacaggttcagagtcagtggagactcagacagagagcatgagagggggagatgggagggagagagagaactcatatctggacttaattgaggttccaaaggctacatccttctcccctctgcagtgccttcctgaggggttttctcccctagcctgaagaatcttcctggtcttctcaactggttaggcactgctgacactgcacccacagagaaattcagaaatgtgcaaattgttgagcttaataagcaaaatcacaaatttgattggggaagttgtggaagaagagatggttttctccaaaacagatggcattgtgactctaggcagaaatcctgcatgaacagactcttgaggatgcctgaactcataagacccccccaacatcacacccccagggaaagcagtgtgatatagtatggtggtgacagacccaggggtgcggatttgggtctctggcaggacaagttacttcacctctctgagctgcagcactctcctctctaaaccaggcaaatgagttttgtttttctgtgggtttttgtgttcgtttgtttgcttgttttgagacagggtcttgccctgtcacccaggctgaagtgcagtgatgggatcattggctcactgcagcctcaacctcctggactcaattgatcctcccacctcagcctccccagtagctgggactatgggtgtgtaccactacacccagctaattttctgtgtttttttgtagagacagggttttgctatcttgcccgtgctggtctggaactcctgggctcaagcgatccacccacctcggtctcccaaaatgctgggattataggcgtgagccacggcgcccggccacgtatgattcttcataggagataatctcttgagagggttccgttttttaatgcttcacttttatactttccagaacagcacagcccttgtaaaaatttattagcgtcggttaacaaaaaaccaagaagagcattaagatgaacatgtactgacctcatgctaagcggcacacagacctcatgggaactaaagccatggcatataaaactgaggggtgtttagtttggggatgatttttaaggggctgaattcctcattaagactgtggaaagatgcccccagcattgtcccagctgacgctccagacgaggcaatgtaggagaaaaatgcttttccgtgtttgtcactatccctgtggcattgccctgcccagtacagcttttctccactcgagcaaagcgtctatgcatcccccaggcccccacctaggtgctgtgggaggaaaggggaatgccaggtgttgtccattgttactgcgtgcaccaaaggaagcctccttcctcttcagtggagggtgatagcacgttccccaccctggaagagagttgctgctttgccatgccttgattctggttgagagtcccaaaggatgacagaatcacttcccttgggcctcactgccaaatataatccacttaatatcctccaagtttgaggccataagtctgtggcgcatccagatgcgacccccgaggcgatagcatcaacgtgggagccaatgcaactcaaaagaaggatggggcttcgcacctcctccttgggtaggaagtaggttagctgcttggaaaatgcaggaactggcactgaagagatctgagtctgaacatatccctcacccgtcagtagcactgggaccttgtgcaatgttagttttcccttccctgcttcaacttagatggctcgggccctgagaaagtgattcacagctgaaaaataaatcaaaggcctcgtgttctaaaaagagtttatggaaggagaggcagctgatgaaagtctagaaagaaggctgaacttttccaatgagcacaataagccatttttaccctgcctgtaatcctcggggtggaatcccgcgagtggccgaggcgagcacccttcccgccgttcctgtttctaaggctaaatgatgtcatgccagcctgcgtgagcatatcaatctgtatttctgagtatgaactggatttgaggggtgcattggtgctccagccctccagatcagtaagacaaccaatgcagaaacaagggctcccaggctcctcttctgcaagaggctgttagtgacgtgcccgctgggacagccctgcccaggatggccccagctggggagcctttggcttccatctggcggcgttctatattatcccatccttctgtctcacccttcctaggttcagcttctctgaagagtacacagcatttgctcagtggagttgtaaaatgtattggtaaagtgctctgggttgacacgttcctttgcttctttcctaaatgccaggctctgtgttattagggccgtctgtcgcttcccagcgcctcccgaggtgactgcttccctgactcggtggctgcttaatattcagtgccatttcctcctcccgactgtcctggcgtgggtgtgagtgtgcctgtgtgtgtgctcgtacagcagttgttatcatgatgtacttactggctgtctaccgatggctttcctttcattctactattttttggttgacttctgtgagctgtgagtcatcggtggtaacattatgcattgaatggattagctggtacctaaaaatagccgaggccctcatgcaggcggcacatgagcctgtagagtcagtccctttgcagccaaggcagacccacttgccaacattgaacatgccgagcttggtggcgatgaatcctaatgtatcaaaaaatagatagttggtgactgccctgtgtgcagagcccagccctggatttgtgccgcagttgttggtaatacacacttcctgtctgttctggtgctggaaaggctccaacagagaaactatgtcaaaccacatttttgtttgtgggtctttgtacctctctaaaaaaaaaaaaaaaggagaaaaatgctctcctttaaactgtatgtgctatatgtgcccccaactgggtcatcttatatgttttgattctctcagactgttgttgtttatagcatttagaaaaaaattaaagactattgtttaaagcagttttaggtgtacagcaagtagagagaggtctcacacacctaacagttttccctgttattaaaatcttgcattggtgtgatagattggttacaactgatgagccagtaccgataccttatttttaactaaagtccatagtttatactacagttcactctgtgttgtacatgctgtttttgatgaatttatgatgtcatgtatccagcattacattattatacagaacagctgtaccaccctaaaaatcccttatgcatcaactatttgtcccccacaccccacctgaaactcctggcacccactgatcattttactctctccatagttttgcctgttccagaatgccatgcagttggaatcatccggtatgtcgccttttcacattggcgtctctcacttagcgatatgcatttcaggttcttccatgtcttcttgttgctctgatagctcatttctttttagcactgaatattatgttgttctttaaggcacattttttttttttgagatagggtcttgctctgttgcccaggctggagtgcagtgacaccataatagctcactgcagctttgacctcctaggctcaagcaatcctcccacttcagcctccctaggaacagggaccacaagtacacaccaccacgcccagctaatttttctatttttttgtagagacggggtcttgccatgttgcccaggctgctcttgaactcctgagctcatgtgatcctcccgcctcaggcccccaaagtgctgggattacagggatgagccacccttccctgcctaaggcacacattttaaggccccagaaaaggaaggcaagtgagctagaacctgtgtgcctaagggcttccgtgtcacagctgctgtggtcactcactgggcagtgtccttcctggccatccctgagcctccccacagggccttcccacaagggagctctgtgagccacgctaccatgtgtaagaaaaacccagcttttaatgtgggatttgtgttaggaggcgtcccggtgctagggtgtgggtttactgaacaaccctgaaacacttccaccaaggactgagtcaggctttgcgtgaacatgattcagtgttttaaatagaacactcacagagattcttacactcagccaaagcgttttgactgtttttattaatgatttttaaacattgcagtaaatgggtctctcgcttacccccttcatctttgagacggggttttctgatttttttcatgctgagaacgtaaccatgcagacttagccttccaggaaagcagaccggcctttctctacaggtaaaacaagactgagaatttcacttgcagacaaagttaagaatgcccaatttaataatttcgccaaaaaacaagacatacttactgaaacctagcttatgagagaattcattgctcccagcaacaggcgaaatttgtatgtctgggatagtgtcatgaaaaaatgttttgtaaaacagatgcccttcgcaatttgtgaaaacagggactcttgtgaaggaaatgggagacatatttaaacaacagacgttttgttttctttctatcttgtttttggtgatatgtacatatgtgtgtatatagacatagcaccaatctaagattgaaatatacaatcaaacagcataaatatgcgtgtatgtgcatagtgtttagatatagtagttattgactaagtggtgaaaggaattttattgaattttcatacagaggagctaaaatttttcttaaaagccagtcattagtcagattaggaaggtgacatttaaaaaataattatgagcccagaagtgagtcggtgttgtctccctgtctaggttcgtccatccaaaatgggagttggaggtgacagttctagaggagtcgatttagggggatggatggaggaaggggtaggcagatctcttataaccacactgatgagcacatgggcttgctggcagcagtgggaggagggagggaaagagtggaggagggtgggaggcggtccacccccaaaagcaagaggtgctggcgacagggcatccagagatgaaagacagagggccctcaagcttacaaaagtataaaggccatccctgggcgcggtggctcacacctgtaatcccagcactttgggaggccgaggtgggtggatcatctgaggtcaagagttcaagaccagcctgactaacatggtgaaaacccgtctctactaaatacaaaaaaattagcctggtgtggtggcaggcgcctataatcccagctacttgggaggctgaggcaggagaattgcttgaacctgggaggcagaggttaccgtgaatcaagatggcaccactacactctagccttggcgacagagtgagactctgtctcaaaaaaaaagaaagaaagaaagaaagaaaagttataaaggctattctacttactgcttagggtgtttgaaacaggatatatttactggatgaaaaaatgggctatattgagctgtctggcgttatgtaacgtgctttggttatctgtggtactgctcccatgagtttattttcattgggatttaatcagaaaccattctggaaaatgtgtggaaccccagcaagatcataaaatgacttaatgattactaacacagctgcaagaacgagagtggagagaaaataactgaagtgtgattcaataaaatcatgacgacctcagcatctgacaaggtgaggtggctatggctccgctgagaaagctgcctgttaggcggtaaagccacaccctggagaaagcactgctcctctccctgggggaggtcacagcccactttagttctggctggttaaaaaaaaaaaaaaaaaaaaaaaaaaagacaggcagtctctctattgccccctgttgtccacttgtaccattgcaatgtttttccatacagaaggcaaacagaactattctttcagttttttttttgttttgtttttgttttttttaagacggagtcttgcactgtcacctgggctggggtgcaatggcgtgatcttggctcactgcaacctccgcctcccaggttcaagcaattctcctgcttcagccttcagagtagctgagattacaggcacctgctcccacgcctggctaatttttttgtatttttagtagagacagggtttcaccatgttggtcaggctggtcttgaactcctgacctcatgatcagcccgcctctgcctcccaaagtggtgggattacaggtgtgagccaccatgcccggcctcttctttcagattttaactgagcacctattacttgctaggaagtcttttagactctggagatagaacactgagtttggggaaagaggcaaaacagacaaatatacaagtaaataaaaaagaatgcataagaagataaccagtcccttttggcaccagggactggtttcatggaagaagattttttggcaggatgggaagagggagggggatggttttgggatgaaactgttccacctcagatcatcaggcattagttagattctcataaggagtgcacaacctggattccttgcatgcgcagtttacaatagggttcacgctcctatgagaatctaatgcttgcgactgatctgacaggaggcggagctcagtctggaatggttgctcacctccagctgtgcagcccagtacctaacaggccatggactgctactggtctgttgcctgggggttggggatccctggtataaagaggagaaggggccaggctaggtggctcatgcttgtaatctcagcactttgggaggctgaggcaagagggcacttgaggccaggagttttgaaaccagccaggccaacatagcaaggctccatctctacataatgatcatcattatcttcaccaacaaaacattagctggacatggtggtgcatgcatgtggtcccaactactcaggcggctgaggcaggaagatatcttgagcccacgaggtcaaggctgcagtgagccatgatcatgctactgtactccagcctgggcaacagaacaagaccctatctcaaaataaaaaaaggaagctatggaaactagagggttgttattttaaatagaactgtcaggggagttctctctgaaaaggacagtgggtggcaacagtacgtgaggcaaaaaagattccaaatgaatggagagagtagcaggtgcccagacggaaggcgcaagaggggttaaagaaccagcaaggagaccactgttgctacagtgtagggagtaaggggcacatgcagaccacatcaggcttgcatgtggtgaccgagcgagtgagatgcagcttggccaggacaaaggtggtggaggtagtaaaaaaatagtatcattctaggtgtatttggaaaaggaacccatacagtttgcttataattgggatgtttgtgatgtaagagaaagagcggaagaaagtatgattccaaggtgcttgattgaacagccggaagaatgggataccatttatggagatggggaagaacatgggatggccaccgggcaggggcacatcgggaggtctggtgtgttttaggtcactttaagtttgagttgcccattcgacatctgagtggacgtcatcggatagtgtggtcactggtgtccaaatgtacccgttttgcgtgtatgttctgtctcctggtgggaggcaagaaactaggtcttaaccaatagatactcttctaaggttcctaacacttagcaggtgctcggtgtatacttgttgaacttttattaaaactggaaagcctgaaatgtatcattaggaaccctcaataatattttgaggccgggcacggtggctcacacctgtaatcccagcactttaggaggccaaggcaggcagatcacttgaggtcaggagttcaagaccagcctggccaacatggtaaaaccccgtctctactaaacatacaaaaattagccaggtgtggtggcttatgcctcccagctactcgggaggctgaggcaggagaatcgcttgaacccaggaggtggagtttgcagtgagccgagatagtgccactacattccagcctgggcaacagagcaagactccatctcaaaaaaaaaaataataataataacaatattttgaagctatcagcatcatagagaatacccatatgggttttaaattcaaggaattcacagacttattgttccagttgaagatgacatcatcctacaaaatcacaccgtctctgtttcacatccaaaccagtccccgctggcattgacagcatgttttgagatggagaaggctcctctccaagggaatttcaagcaacagatttgatgatatatattctcactgagaaacccctcagtgagatttcttcattaacggttaatgatcagttaacctttaagaatgtttatatccttatgacaaacctaattataaaataaagatagatttgctatgaatgcttgagtgtacctatttgagatgtgtgcaacaagattttaactttcaccaaagaagggaaaaaaaccttattttacttctcatacattcagaccccaagggggaaaaagtacattgtctaggtagttcacactaattagtgaggagaaaactagcattgggctggcaagctatccgatctgtgcctacaatgatcagattatctgaataatcttccgctcccacctcagctttcatggacccagctgatatctggtcgtggcatcttttcgcagggtgacacagctcctttggtaggaagcaaaggcagaatttaggcaaaaagaaacaaagagaagcctttgaagtgattaaagaagaatctcccaagcctatctaggttaacataaatttcattaacaggccaggtgggcgcggtgactcacttctgtaatcctagcattttgggaggctgtggcgggcagatcgcctgagatcaggagttcaagactagcttggccaacatggtgaatgaaaccccgtgtctactaaaaatataaaaaattagccaggggtggtggtgggcacctgtaatccctgctacttgggaggctgaggcaggagaatcgctcgaatccaggaggcagagattgcagtgagctgagatggtgccactgcactccaacctgggtgacagagcgagactctgtctcaaaaaaaaaaaaaaaattccattaacgtcatcttgttttagtacgcatctcaaatattctctctctccatcacttttctctcgtgaatttttcggcaggctgttctagctatggttcacaccacagcatttaattctaaggcctgtctttggagatttggagtttggtttggtttggtttggtttttagagacagagtcttgctctggcacacaggctggagtggtgcagtagctcgagtgaccctcgcacctctgtaactgaacttaggtttggctgctcaccactcaaaagccaaatacgagagatgaggttggtgagaggaaaagcaggtttattgggaaagccagagaaattgagaagatgatgagctagccttctaaagtaccatctccaggccaggcatggtagctcacatctgtaatcccagcactttgggatgccaaggcaggcggatcacctaaggtcaggagtttgagaccagcctgacccacaatggccaaacaccatctctactaaaaaatacaaaaattagccaggtgtggtggcacatgcctgtagtcccagctactcaggaggctgagacaggagaatagcttgaacctaggaagcagaggttgcagtgagccgagattgtaccactgcactccagcctgggcaacagagaatccatctcaagaaataataattttgtaaaaattaagtaaaatctccaattttttaggctggttggagggtttttatgggaggggggtatggggggagacgaaggggttagtatcgaggagactgaggaccatagacatttgggcaccagtgagggttcaagaaggttgagaacttctttgtccttggtcaggtcataatgctccttcagtctttagtatttttaatagagggtttcaccatattggccagactggtctctaactcctgacctcaggtgatccgcccgcctcggcctcccaaagtgctgggattacaggcgtgagccaccgtgcccagccactcctatcagtctttaacaatatatagttagttgtttatatacttcccctttaatcccagagttagtttctaaaagtacatgattgttgtttgtgtatattatctcggtgccataaaattatcctagcctacgtgcaggaaagggtaaaaccctttaaacaaaaatggagttagttatgttcgttcttttgctatttcacaattgtacctcagcctcccaaagtgctgggattacaagagtggtgtctttggagttttgagatgcggaaataatgaaaggctttcaaaatgtccaataacattatgaagtctttagagggaaacacgtgtatctgtatcctgacttttgcactaatcaattatagtacctgttataaagggcttgtagacatttcttaatgagtctacagatacttggtaacgtggaaatcctcagataagtttacctatgagaacacagtagatgttattttcagaaaattaaatattgcctgccctgtgaagtgtgtataatgtggctcacacaccaagggcctctccatgggtaggtgtccggccatctgccagcaaggagacagggagttatccgggaacacgcagaaccagaaaagaggctgacatgtttggaactaaggcttctggtcttctgaatgtcacattacctctgcctggtgttgggcaagaataagcaaaccgcaactctggtagagagtcttacgagacagatgttaacacctgagagttttatttttatgacttggatttgcagcaaaacaatctccacttgatgtgggattggtttccttctgttcagtttatgttgttaatgactctaagaggtttgcaagaggatctatggagccagttccagattggtcctcctacttagaatacagtgggtatccccatctgatacagtcacttgtaagtatatttgtctatgtatatatgcacatatatgtttctgtgtgtgatgtaaatgtagttttgaaaccaaatagtgtcacacacttgtacagggtaactagaattgtatgagtggctataaggcaaacactgcatcacaattatctgtaccatggaacaagcccatgagctcatgcctttggatcctacttatttcagtcaatattcaccactgttggggggtagcaggaatgcttagttcatctcttttggtggcattgtaatgtctttgctcacaagggtagaggtcaggaggcacagaaaaaagaaaatgggtttgggggccaatgactgggataaaatcctaaacccattagctaatagctatgacattaggcaagtgacttaatctctctgtgactattcgtaaaatttacaaaattggaagagcaatactattccatactaatactattatgaacattaaacaaaatactttttgtaaagtttgtacctgagagcttgacagagagtaggcactcaaaaacttttagcttgcttcacattataaaaatagcccagaacaatgaaactttcccccagtaatacacacaggagaaggggttcatgcttacaagctgccatatgaatgtactcaagttgtctcttctaaaaatatgccttgtatggatccagtaaagtctgtcattctagaaatgtatcagaactagatcaatcagagttaacaaaggaaacaaagaagatgaagtagaaaagcaacaatctgtggaaatctactacttttaaagtttttttggtacttcaattatgcatgtgtgtttttgtgtgtctgaatgtgtataaaatccaatggaggcctgacacggtggctcacgcctgtaatcccagcactttgggagactgaggcgggtggatcatgaggtcaggatatcgagaccatcctggccaacatggtgaagcccccactctactaaaaatacaaaaagtagctgggcgtggtggtggtggtgcatacctgtagtcccagctacttgggagtctgaggcaggagactcgcttgaacccgggaggcggagattgcagtgagccgagatcgcgccactgcactccagcctgggcgacagagcaagactccctctcacaaaaagaaaaaaagaatccaacaatattttaaatattgttacatatagccaatattcattcagattcaccatgtatctaccattttcattcctcttcattcctccctgtacaaacttcaatctagatttgttttttctctacctaaagaataccttttagtattttctataatgcagatctgttgatggtgaattcttttaattactgtttgtctgaacatgtctctattttgccttcattctggaaggatctttttgctccatatagaattcgccattgacaattctttttctttagcactgtaaagatattccattgtctccattgtctactggcttccattatttttgttgagatgtaaactgtgagttccattgttgcttatttggagataatatgtattttgttctagaggctttttttttttaatggagtttctctattgtcgcccagtctagagtgtgatggaatgatcttggctcactgcaacgatcttggctcactgcaacgatcttggctcactgcaacctccgcctcccgggttcaagtgattctcctgcctcagccccccgagtagctgggattacaggttcctgccaccatgcccagctaatttttgcatttttagtagagatggggtttcaccatgttggccagactggtctcaaactcctgacctcaggtaatccacccacctcggcctcccaaagtgctgggattacaggcaggagccaccacacccagcctgttctagaggcttttaacgatattttttcctgtttagtttacaagatgtctttgatttatagcagtttaattctcatctgcctcagtgaggatttctttttgtttatttttcctgtttggggctaggccttcttgaaactgtcttattatccttcttcagtttgggaaaattcttagccattacctcctcaagtattaacttctgccctattatctccctctcttcctcctcctaggattcaaattatgtgtctgttagcccctctcaatgtatcctatgtgtctcttaccctctcctccatattgaccatctttttgtctctatgttcactctgtggagtctcttctaaagctctaattagagaatccagttcctgaattctttcttaatccatgtctattcaactggaaagctcattgcattcttgatttcagtggtgtatattttaattctacaattctcatagaccttttttaattaattaattattattattattattatttattttttttttttttagagacagagtctcactctgttgtccaggctggagtgcagtcttgtgatcatagctcactgcaacctctaactcctgggctcaagatcctcctgcctcagcctcctgagtagttgggactacaggcacgcatcaccacactaggctatttttttttaaatttctgtagaaacggggtctcattttgttgcccagactggtctgaaactcctggcctcaagtgatcctccctgtctcagcctcccaaagtactgagattacaggcatgagccaccatgcctggcttcatggatcttttaaaaacagattctagtttcctatcaaaattctcaagctgtctttaatcttcttaattattgtaagcatagtctttgtaaagtctatatgtatgactctatatgagaagccctggtgcatccttttttaagatctgatattttgctagtgcttatacaagctatctggtctcctcatgaccaccaccccccttttttaaattgaatgcttttatttgcaaaattgtgaaagtaattcaagaccttaatccagttttagggactcagatgagtcaatctgagcttcagaccttgaaaggcctgttggcttgtggttcactgtctcctctaagggacagtgctttggggtcacaactcaaaagaatggggctcaccagagaacaccctcccttggtgtatcctgaactccattacctgttccctatgctcttaacactatcaaaagcccacttggtttcccaactgctccactttggaatgttcaagtgccttcaggagaaaacaggcccccaacaccagcttcacctctctgggccatcatcttttcctgatccaacccaggaagtgtgtgtgtgtgtgtgtgtgtgtgtgtgtgtgtgtgtgtgtgtgtgacggagtttcactctgtcgcccaggctggagtgaagtggcatgatctcggttcactgcagcctccgcctcccgggttcaagcgattctcttgcctcagcctcctgagtagctgggattataggcgcctgccaccacacctggctaatttttgtatttttagtagggacagggtttcaccatgctggccaggctggtctcagagtaaagtggcacgatcttggctcactgcaaccttcgtcccccggactcaaacgattctcctgcctcagcctcctgagtagctgggattataggggcccaccaccacacctggctaagttttgtatttttagtagagatggggttttgccatggtagccaggctggtctcaaactcctgacctcaggtgatccacgcgccttggcctcccaaagtgctgggattacaggcatgagccaccgcgcctggcctttttactatcttatttgctgtccagtactataagaaaaaaagtttaaacattttgtccagagtttttaaatttatttgtttgcttatatttttgttcagagtttttagttgtcctcagaaggagggttggtccaaattacctagtctactacatctagaaaggacattggaaattgactttttttttttttttttgagacggagtctcactctgtggcccaggctggatcgcccagtggcacgatctcggctcgctgcaacatctgcctcctgggttcaagtgattctagtgtttcagcctcccaagtagctgggattacaggtgcccgccaccacgcatggctaattttttttttttatttttagtggagacggggtttccccatgttggccaggctggtcttgaactcctgacctcaaatgatccacccaccttggtgtcccaaagtgctgggattacaggcatgagccactgtgcccagccaccaagcatccttttaggggctggggactcagtgataaacacactgtgcctgcttcttggaactcacagtctcactctgatccatgtttagtcctgtcctgtatgataatagcagttgtccattgagctcataaaatctaagaccgcgctgggcttgtgagccacctgcagagcctagcttggtgctgaaagctaagtgggtgctctgtcattactggggttcgattgactggttctaacagagaccagctatagagctaacacttgatggaatattttgaatattgatgaccttttcactggcttctgcctatggcaagtagaggtacaacccaaagagaagagcctcatttatagtgtgtggctgggggagagggaggtttgcaaactgagtcattttcccccattcagcctgtgtgtgtctgtgtgagttcatacctgtgtgtgtgcataaaatcaaacaagaataaaatgttttcatttgttcccttccttcttcctctctctgtctctccctgtttccacaggtcagcgttgaagttttggtagagtatcctttttttgtgtttggacagggctggtcatcctgctgtccggagagaaccagccagctctttgatttgccgtgttccaaactctcagttggggatgtctgcatctcgcttaccctcaagaacctgaagaacggctctgttaaaaagggccagcccgtggatcccgccagcgtcctgctgaagcactcaaaggccgacggcctggcgggcagcagacacaggtatgccgagcaggaaaacggaatcaaccaggggagtgcccagatgctctctgagaatggcgaactgaagtttccagagaaaatgggattgcctgcagcgcccttcctcaccaaaatagaacccagcaagcccgcggcaacgaggaagaggaggtggtcggcgccagagagccgcaaactggagaagtcagaagacgaaccacctttgactcttcctaagccttctctaattcctcaggaggttaagatttgcattgaaggccggtctaatgtaggcaagtagaggcagcgtgggggaaaggaaacgtggctctcccttatcatttgtatccagattactgtactgtaggctaaaataacacagtatttacatgttatcttcttaattttaggtttctgttctaaccttgtcattagagttacagcaggtgtgtcgcaggagactggtgcatatgctttttccacgagtgtctgtcagtgagcgggcgggaggaagggcacagcaggagcggtcagggctccaggcatccccggggaagaaaggaacggggcttcacagtgcctgccttctctagcggcacagaagcagccgggggcgctgactcccgctagtgtcaggagaaaagtcccgtgggaagggtcctgcaggggtgcagggttgcacgcatgtgggggtgcacaggcgctgtggcggcgagtgagggtctctttttctctgcctccctctgcctcactctcttgctatcggcatgggccgggggggttcagagcagtgtcctcctggggttcccacgtgcaaaatcaacatcaggaacccagcttcagggcatcgcggagacgcgtcagatggcagatttggaaagttaaccatttaaaagaacatttttctctccaacatattttacaataaaagcaacttttaattgtatagatatatatttccccctatggggcctgactgcactgatatatattttttttaaagagcaactgccacatgcgggatttcatttctgctttttactagtgcagcgatgtcaccagggtgttgtggtggacagggaagcccctgctgtcatggccccacatggggtaaggggggttgggggtgggggagagggagagagcgaacacccacgctggtttctgtgcagtgttaggaaaaccaatcaggttattgcattgacttcactcccaagaggtagatgcaaactgcccttcagtgagagcaacagaagctcttcacgttgagtttgcgaaatctttttgtctttgaactctagtactgtttatagttcatgactatggacaactcgggtgccactttttttttttttcagattccagtgtgacatgaggaattagattttgaagatgagcatatattactatctttaagcatttaaaaatactgttcacactttattaccaagcatcttggtctctcattcaacaagtactgtatctcactttaaactctttggggaaaaaacaaaaacaaaaaaaactaagttgctttctttttttcaacactgtaactacatttcagctctgcagaattgctgaagagcaagatattgaaagtttcaatgtggtttaaagggatgaatgtgaattatgaactagtatgtgacaataaatgaccaccaagtactacctgacgggaggcacttttcactttgatgtctgagaatcagttcaaggcatatgcagagttggcagagaaactgagagaaaagggatggagaagagaatactcatttttgtccagtgtttttctttttaagatgaacttttaaagaaccttgcgatttgcacatattgagtttataacttgtgtgatattcctgcagtttttatccaataacattgtgggaaaggtttgggggactgaacgagcataaataaatgtagcaaaatttctttctaacctgcctaaactctaggccattttataaggttatgttcctttgaaaattcattttggtctttttaccacatctgtcacaaaaagccaggtcttagcgggctcttagaaactctgagaattttcttcagattcattgagagagttttccataaagacatttatatatgtgagcaagattttttttaaacaattactttattattgttgttattaatgttattttcagaatggcttttttttttctattcaaaatcaaatcgagatttaatgtttggtacaaacccagaaagggtatttcatagtttttaaacctttcattcccagagatccgaaatatcatttgtgggttttgaatgcatctttaaagtgctttaaaaaaaagttttataagtagggagaaatttttaaatattcttacttggatggctgcaactaaactgaacaaatacctgacttttcttttaccccattgaaaatagtactttcttcgtttcacaaattaaaaaaaaaatctggtatcaacccacattttggctgtctagtattcatttacatttagggttcaccaggactaatgatttttataaaccgttttctggggtgtaccaaaaacatttgaataggtttagaatagctagaatagttccttgactttcctcgaatttcattaccctctcagcatgcttgcagagagctgggtgggctcattcttgcagtcatactgcttatttagtgctgtattttttaaacgtttctgttcagagaacttgcttaatcttccatatattctgctcagggcacttgcaattattaggttttgtttttctttttgttttttagcctttgatggtaagaggaatacgggctgccacatagactttgttctcattaatatcactatttacaactcatgtggactcagaaaaacacacaccaccttttggcttacttcgagtattgaattgactggatccactaaaccaacactaagatgggaaaacacacatggtttggagcaataggaacatcatcataatttttgtggttctatttcaggtataggaattataaaataattggttctttctaaacacttgtcccatttcattctcttgcttttttagcatgtgcaatactttctgtgccaatagagtctgaccagtgtgctatatagttaaagctcattcccttttggctttttccttgtttggttgatcttccccattctggccagagcagggctggagggaaggagccaggagggagagagcctcccacctttcccctgctgcggatgctgagtgctggggcggggagccttcaggagccccgtgcgtctgccgccacgttgcagaaagagccagccaaggagacccgggggaggaaccgcagtgtcccctgtcaccacacggaatagtgaatgtggagtgtggagaggaaggaggcagattcatttctaagacgcactctggagccatgtagcctggagtcaacccattttccacggtcttttctgcaagtgggcaggcccctcctcggggtctgtgtccttgagacttggagccctgcctctgagcctggacgggaagtgtggcctgttgtgtgtgtgcgttctgagcgtgttggccagtggctgtggaggggaccacctgccacccacggtcaccactcccttgtggcagctttctcttcaaataggaagaacgcacagagggcaggagcctcctgtttgcagacgttggcgggccccgaggctcccagagcagcctctgtcaccgcttctgtgtagcaaacattaacgatgacaggggtagaaattcttcggtgccgttcagcttacaaggatcagccatgtgcctctgtactatgtccactttgcaatatttaccgacagccgtcttttgttctttctttcctgttttccatttttaaactagtaacagcaggccttttgcgtttacaatggaacacaatcaccaagaaattagtcagggcgaaaagaaaaaaataatactattaataagaaaccaacaaacaagaacctctctttctagggatttctaaatatataaaatgactgttccttagaatgtttaacttaagaattatttcagtttgtctgggccacactggggcagaggggggagggagggatacagagatggatgccacttacctcagatcttttaaagtggaaatccaaattgaattttcatttggactttcaggataattttctatgttggtcaacttttcgttttccctaactcacccagtttagtttgggatgatttgatttctgttgttgttgatcccatttctaacttggaattgtgagcctctatgttttctgttaggtgagtgtgttgggttttttccccccaccaggaagtggcagcatccctccttctcccctaaagggactctgcggaacctttcacacctctttctcagggacggggcaggtgtgtgtgtggtacactgacgtgtccagaagcagcactttgactgctctggagtagggttgtacaatttcaaggaatgtttggatttcctgcatcttgtggattactccttagataccgcatagattgcaatataatgctgcatgttcaagatgaacagtagctcctagtaatcataaaatccactctttgcacagtttgatctttactgaaatatgttgccaaaatttatttttgttgttgtagctctggattttgttttgttttgttttttaaggaaacgattgacaataccctttaacatctgtgactactaaggaaacctatttctttcatagagagaaaaatctccaatgcttttgaagacactaataccgtgctatttcagatatgggtgaggaagcagagctctcggtaccgaaggccgggcttcttgagctgtgttggttgtcatggctactgtttcatgaaccacaagcagctcaacagactggtctgttgccttctgaaaccctttgcacttcaatttgcaccaggtgaaaacagggccagcagactccatggcccaattcggtttcttcggtggtgatgtgaaaggagagaattacactttttttttttttaagtggcgtggaggcctttgcttccacatttgtttttaacccagaatttctgaaatagagaatttaagaacacatcaagtaataaatatacagagaatatacttttttataaagcacatgcatctgctattgtgttgggttggtttcctctcttttccacggacagtgttgtgtttctggcatagggaaactccaaacaacttgcacacctctactccggagctgagatttcttttacatagatgacctcgcttcaaatacgttaccttactgatgataggatcttttcttgtagcactataccttgtgggaatttttttttaaatgtacacctgatttgagaagctgaagaaaacaaaattttgaagcactcactttgaggagtacaggtaatgttttaaaaaattgcacaaaagaaaaatgaatgtcgaaatgattcattcagtgtttgaaagatatggctctgttgaaacaatgagtttcatactttgtttgtaaaaaaaaaaaagcagagaagggttgaaagttacatgtttttttgtatatagaaatttgtcatgtctaaatgatcagatttgtatggttatggcctggaagaattactacgtaaaaggctcttaaactatacctatgcttattgttatttttgttacatatagccctcgtctgagggaggggaactcggtattctgcgatttgagaatactgttcattcctatgctgaaagtacttctctgagctcccttcttagtctaaactcttaagccattgcaacttctttttcttcagagatgatgtttgacattttcagcacttcctgttcctataaacccaaagaatataatcttgaacacgaagtgtttgtaacaagggatccaggctaccaatcaaacaggactcattatggggacaaaaaaaaaaattatttcaccttctttccccccacacctcatttaaatggggggagtaaaaacatgatttcaatgtaaatgcctcattttattttagttttattttgatttttatttaatataaagaggccagaataaatacggagcatcttctcagaatagtattcctgtccaaaaatcaagccggacagtggaaactggacagctgtggggatattaagcacccccacttacaattcttaaattcagaatctcgtcccctcccttctcgttgaaggcaactgttctggtagctaactttctcctgtgtaatggcgggagggaacaccggcttcagtttttcatgtccccatgacttgcatacaaatggttcaactgtattaaaattaagtgcatttggccaataggtagtatctatacaataacaacaatctctaagaatttccataacttttcttatctgaaaggactcaagtcttccactgcagatacattggaggcttcacccacgttttctttccctttagtttgtttgctgtctggatggccaatgagcctgtctccttttctgtggccaatctgaaggccttcgttggaagtgttgtttacagtaatccttaccaagataacatactgtcctccagaataccaagtattaggtgacactagctcaagctgttgtcttcagagcagttaccaagaagctcggtgcacaggttttctctggttcttacaggaaccacctactctttcagttttctggcccaggagtggggtaaatcctttagttagtgcatttgaacttgatacctgtgcattcagttctgtgaatactgccctttttggcggggtttcctcatctccccagcctgaactgctcaactctaaacccaaattagtgtcagccgaaaggaggtttcaagatagtcctgtcagtatttgtggtgaccttcagattagacagtcttcatttccagccagtggagtcctggctccagagccatctctgagactcgtactactggatgttttaatatcagatcattacccaccatatgcctcccacaggccaagggaaaacagacaccagaacttgggttgagggcactaccagactgacatggccagtacagaggagaactagggaaggaatgatgttttgcaccttattgaaaagaaaattttaagtgcatacataatagttaagagcttttattgtgacaggagaacttttttccatatgcgtgcatactctctgtaattccagtgtaaaatattgtacttgcactagcttttttaaacaaatattaaaaaatggaagaattcatattctattttctaatcgtggtgtgtctatttgtaggatacactcgagtctgtttattgaattttatggtccctttctttgatggtgcttgcaggttttctaggtagaaattatttcattattataataaaacaatgtttgattcaaaatttgaacaaaattgttttaaataaattgtctgtataccagtacaagtttattgtttcagtatactcgtactaataaaataacagtgccaattgcagatgtgtgtctttgccttctgttgggtcctcaaggaagaggccaggaaaagagtgctaattcctcctccttattgacccccgctcacgagttctccctgggtaggtcggaggtagggaggtgtgacatgaggcattgccttcgctgctaatgttttggggggaagagtacgtgtgagatgaggttctaagataaaaggcacacagccacacctgatgtcttggtttcttcagttcatgtttatgcctcctagctgaacactgctgttcacaagaggtatacttgtctttaaacatgtggtagcttcatgcgctcgtgtggcataatctatacactccttacagatttgctctaaactggttagtggtctgtaagtggaaaatttatttttacttcctgtaattcaagctcattagaaattcagcgagcagaccgggcacagtggctcacgcccataatcccaacagttggggaggccgaggcacaaggcctgcttgagcccaggagttcgagaccagcctagtcaacatagtaagacctcatctctacaaaaaatgaaattagccgggtgtggtggcacatacctatggtcccagctacttaggggactgaggtgggaggatcgcctggggccaggaggtcgaggctgcagtgagccataatcataccgctgcactccagcctgggcgacagagcaaaactctgcctcaaaaacaaaaaaaaaacccaactcctcgagcaggtctctcagcatgtggaggaactccccgtttacctcaagagtaccacattacagctttgcactgggcccagtcttggaaagatatggcttagcagttgtgccagaaaaagtaattcctcaagaacccatagcttccaggtggaatcccctgcacccacctcaacccacctcaacccacctcaagaccttccagcctcaaggttacacagaggtgggagaacgcttggggttaaattcattttcacttagccaaggaggaactatcttcttgggaaggtgttttggactctcctctgattatttagttgaggtcctgacacattatataataaatatgtgaaaggacacacagcaaaccagagctgtgtaggtgcaactcaggctacaagggctgccccaggtcctgtggagtagcccgggcaaatgtgcctgtgtgctgtgggcaaactcggcaaagcagtctgcatctctgccttccctttttgtttgtgtgagatactgattgttctgacaagtttggggtccagtggctgtgttacttacctcagctggtgaaatcaattagggggaaccataccttcaggtgctgcagcggggcaggacttgaaaccatcaaaagcactgccagagccctcagatggaacggccagagtggcccaaggcaaatggcgtcgagttcactggctgtcctcctcctcccccagctctggcacaggaagcccagtgggtcagcagcaaagctgcatgcttcatctccaggtcctgtgggacacccggtccaagggacactctggtgtgggctcccccagccccactcctatcagaggcagagatgaacctgctaaggcaaacggtgacggagccttacaagttctctttatgggccaggcgcggtggctcacacctgtaatcccagcactttgggaggctgaggtgggtggatcacccgagcccaggagtttgagaccagcctgggtaacatggcaaaaacccatctctactaaaaacataaacattagccagacgtggcgggcacctgtaatcccggctactctgaaggctgaggcacgagaatcacttgaacctgggaggcggaggttgcagtgagccgagattgtgccactgcactctgcctgggtgacagagcaagacttggtctcaggaaaaaaaaaaaaaaaaaagacattctctttctgaaggctctgcttcaaaatggtcctaacgagtttttgattttgtaactactcagttacaagcagctggaagaccacagagagcaaggcggggagcctgcagccaagccccatgtcttgctccacgttaaatcgcctcttggccctcccgtctccaaagtgcagcccttgtgtttctacaggtgcaagagttattcttaatgggccgggcacagtggctcacacctgtaatcctagcactttggggaggttgacgcaggtggatggcttgagccctggagtttgagaccagtctgggcaacatggtgagaccctgtctctataaaaaatacaaaaattagctgggcgtggtagcaggtgtctgtagtcccagctacttgggagactgaggtcagaggatcacctgagcccgggaggtcaaggctgtggtgagctgtgatcctgccactgcactccagcctgggcaacagagaccctgtctcaaattaaaaaaaaaaaaaaaaaaaaaaaaaaaaaactcttaatggatttagtaggggaaagtattacaatggagacaatgctgctggctggatctctaaacataatcttaaaggaccaacagtgggcctgtattatcccagagtgtgacagctctggttggacccttctcatgccatcggtcactgtggacaatcaggccattcattcaccctggcacagcagcaccctgtggatcttctctactccagggtcattgcttgcctttccaaagaaaactgacttgtgtatctgctcttcagccttattaaaaagcaaagtaaaacaacctgatctgcatacgctttccaggcctggaactcaatacttcaaagtttagcggccggtcatcacttcttctgcgttcactgtttaaacaagcatcctggtggactgctgcaggtcagctgcagaggccaattctccaagacaatgtcattgttcccaacccgttaactgacccttatacagtagtgccatgtggtccttccgagaaaggattcactggcacactgagggaatggctctaactcatgtctcaaaccaatgccttttaggatgccactgatcaaagctttggctctttttcagtgtgactccacctgctaatttcttgggagacaaccttcccataaaacatcctgtggaatttcaaatt

SEQ ID NO: 109 - DNA, 10587 bp, Homo sapiens
gaggagagagcagagtataccgcagacatcatttctactacagtggcggagccgtacaggacctgtttcactgcagggggatccaaaacaagccccgtggagcagcagccagagcaacagcagccgcaagacattgtttctctccctctgcccccccttccccacgcaaccccagatccatttacactttacagagcatcgtgcatcaagtcaccagggtggtccattcaagctgcagatttgtttgtcatccttgtacagcaatctcctcctccactgccactacagggaagtgcatcacatgtcagcatactggagcatagtgaaagagtctattttgaagcttcaaacttagtgctgctgcagaccaggaacaagagagaaagagtggatttcagcctgcacggatggtcttgaaacacaaatggtttttggtctaggcgttttacactgagattctccactgccaccctttctactcaagcaaaatcttcgtgaaaagatctgctgcaaggaactgatagcttatggttctccattgtgatgaaagcacatggtacagttttccaaagaaattagaccattttcttcgtgagaaagaaatcgacgtgctgttttcatagggtatttctcacttctctgtgaaaggaagaaagaacacgcctgagcccaagagccctcaggagccctccagagcctgtgggaagtctccatggtgaagtataggctgaggctacctgtgaacagtacgcagtgaatgttcatccagagctgctgttggcggattgtacccacggggagatgattcctcatgaagagcctggatcccctacagaaatcaaatgtgactttccgtttatcagactaaaatcagagccatccagacagtgaaacagtcaccgtggaggggggacggcgaaaaatgaaatccaaccaagagcggagcaacgaatgcctgcctcccaagaagcgcgagatccccgccaccagccggtcctccgaggagaaggcccctaccctgcccagcgacaaccaccgggtggagggcacagcatggctcccgggcaaccctggtggccggggccacgggggcgggaggcatgggccggcagggacctcggtggagcttggtttacaacagggaataggtttacacaaagcattgtccacagggctggactactccccgcccagcgctcccaggtctgtccccgtggccaccacgctgcctgccgcgtacgccaccccgcagccagggaccccggtgtcccccgtgcagtacgctcacctgccgcacaccttccagttcattgggtcctcccaatacagtggaacctatgccagcttcatcccatcacagctgatccccccaaccgccaaccccgtcaccagtgcagtggcctcggccgcaggggccaccactccatcccagcgctcccagctggaggcctattccactctgctggccaacatgggcagtctgagccagacgccgggacacaaggctgagcagcagcagcagcagcagcagcagcagcagcagcagcatcagcatcagcagcagcagcagcagcagcagcagcagcagcagcagcagcacctcagcagggctccggggctcatcaccccggggtcccccccaccagcccagcagaaccagtacgtccacatttccagttctccgcagaacaccggccgcaccgcctctcctccggccatccccgtccacctccacccccaccagacgatgatcccacacacgctcaccctggggcccccctcccaggtcgtcatgcaatacgccgactccggcagccactttgtccctcgggaggccaccaagaaagctgagagcagccggctgcagcaggccatccaggccaaggaggtcctgaacggtgagatggagaagagccggcggtacggggccccgtcctcagccgacctgggcctgggcaaggcaggcggcaagtcggttcctcacccgtacgagtccaggcacgtggtggtccacccgagcccctcagactacagcagtcgtgatccttcgggggtccgggcctctgtgatggtcctgcccaacagcaacacgcccgcagctgacctggaggtgcaacaggccactcatcgtgaagcctccccttctaccctcaacgacaaaagtggcctgcatttagggaagcctggccaccggtcctacgcgctctcaccccacacggtcattcagaccacacacagtgcttcagagccactcccggtgggactgccagccacggccttctacgcagggactcaaccccctgtcatcggctacctgagcggccagcagcaagcaatcacctacgccggcagcctgccccagcacctggtgatccccggcacacagcccctgctcatcccggtcggcagcactgacatggaagcgtcgggggcagccccggccatagtcacgtcatccccccagtttgctgcagtgcctcacacgttcgtcaccaccgcccttcccaagagcgagaacttcaaccctgaggccctggtcacccaggccgcctacccagccatggtgcaggcccagatccacctgcctgtggtgcagtccgtggcctccccggcggcggctccccctacgctgcctccctacttcatgaaaggctccatcatccagttggccaacggggagctaaagaaggtggaagacttaaaaacagaagatttcatccagagtgcagagataagcaacgacctgaagatcgactccagcaccgtagagaggattgaagacagccatagcccgggcgtggccgtgatacagttcgccgtcggggagcaccgagcccaggtcagcgttgaagttttggtagagtatcctttttttgtgtttggacagggctggtcatcctgctgtccggagagaaccagccagctctttgatttgccgtgttccaaactctcagttggggatgtctgcatctcgcttaccctcaagaacctgaagaacggctctgttaaaaagggccagcccgtggatcccgccagcgtcctgctgaagcactcaaaggccgacggcctggcgggcagcagacacaggtatgccgagcaggaaaacggaatcaaccaggggagtgcccagatgctctctgagaatggcgaactgaagtttccagagaaaatgggattgcctgcagcgcccttcctcaccaaaatagaacccagcaagcccgcggcaacgaggaagaggaggtggtcggcgccagagagccgcaaactggagaagtcagaagacgaaccacctttgactcttcctaagccttctctaattcctcaggaggttaagatttgcattgaaggccggtctaatgtaggcaagtagaggcagcgtgggggaaaggaaacgtggctctcccttatcatttgtatccagattactgtactgtaggctaaaataacacagtatttacatgttatcttcttaattttaggtttctgttctaaccttgtcattagagttacagcaggtgtgtcgcaggagactggtgcatatgctttttccacgagtgtctgtcagtgagcgggcgggaggaagggcacagcaggagcggtcagggctccaggcatccccggggaagaaaggaacggggcttcacagtgcctgccttctctagcggcacagaagcagccgggggcgctgactcccgctagtgtcaggagaaaagtcccgtgggaagggtcctgcaggggtgcagggttgcacgcatgtgggggtgcacaggcgctgtggcggcgagtgagggtctctttttctctgcctccctctgcctcactctcttgctatcggcatgggccgggggggttcagagcagtgtcctcctggggttcccacgtgcaaaatcaacatcaggaacccagcttcagggcatcgcggagacgcgtcagatggcagatttggaaagttaaccatttaaaagaacatttttctctccaacatattttacaataaaagcaacttttaattgtatagatatatatttccccctatggggcctgactgcactgatatatattttttttaaagagcaactgccacatgcgggatttcatttctgctttttactagtgcagcgatgtcaccagggtgttgtggtggacagggaagcccctgctgtcatggccccacatggggtaaggggggttgggggtgggggagagggagagagcgaacacccacgctggtttctgtgcagtgttaggaaaaccaatcaggttattgcattgacttcactcccaagaggtagatgcaaactgcccttcagtgagagcaacagaagctcttcacgttgagtttgcgaaatctttttgtctttgaactctagtactgtttatagttcatgactatggacaactcgggtgccactttttttttttttcagattccagtgtgacatgaggaattagattttgaagatgagcatatattactatctttaagcatttaaaaatactgttcacactttattaccaagcatcttggtctctcattcaacaagtactgtatctcactttaaactctttggggaaaaaacaaaaacaaaaaaaactaagttgctttctttttttcaacactgtaactacatttcagctctgcagaattgctgaagagcaagatattgaaagtttcaatgtggtttaaagggatgaatgtgaattatgaactagtatgtgacaataaatgaccaccaagtactacctgacgggaggcacttttcactttgatgtctgagaatcagttcaaggcatatgcagagttggcagagaaactgagagaaaagggatggagaagagaatactcatttttgtccagtgtttttctttttaagatgaacttttaaagaaccttgcgatttgcacatattgagtttataacttgtgtgatattcctgcagtttttatccaataacattgtgggaaaggtttgggggactgaacgagcataaataaatgtagcaaaatttctttctaacctgcctaaactctaggccattttataaggttatgttcctttgaaaattcattttggtctttttaccacatctgtcacaaaaagccaggtcttagcgggctcttagaaactctgagaattttcttcagattcattgagagagttttccataaagacatttatatatgtgagcaagattttttttaaacaattactttattattgttgttattaatgttattttcagaatggcttttttttttctattcaaaatcaaatcgagatttaatgtttggtacaaacccagaaagggtatttcatagtttttaaacctttcattcccagagatccgaaatatcatttgtgggttttgaatgcatctttaaagtgctttaaaaaaaagttttataagtagggagaaatttttaaatattcttacttggatggctgcaactaaactgaacaaatacctgacttttcttttaccccattgaaaatagtactttcttcgtttcacaaattaaaaaaaaaatctggtatcaacccacattttggctgtctagtattcatttacatttagggttcaccaggactaatgatttttataaaccgttttctggggtgtaccaaaaacatttgaataggtttagaatagctagaatagttccttgactttcctcgaatttcattaccctctcagcatgcttgcagagagctgggtgggctcattcttgcagtcatactgcttatttagtgctgtattttttaaacgtttctgttcagagaacttgcttaatcttccatatattctgctcagggcacttgcaattattaggttttgtttttctttttgttttttagcctttgatggtaagaggaatacgggctgccacatagactttgttctcattaatatcactatttacaactcatgtggactcagaaaaacacacaccaccttttggcttacttcgagtattgaattgactggatccactaaaccaacactaagatgggaaaacacacatggtttggagcaataggaacatcatcataatttttgtggttctatttcaggtataggaattataaaataattggttctttctaaacacttgtcccatttcattctcttgcttttttagcatgtgcaatactttctgtgccaatagagtctgaccagtgtgctatatagttaaagctcattcccttttggctttttccttgtttggttgatcttccccattctggccagagcagggctggagggaaggagccaggagggagagagcctcccacctttcccctgctgcggatgctgagtgctggggcggggagccttcaggagccccgtgcgtctgccgccacgttgcagaaagagccagccaaggagacccgggggaggaaccgcagtgtcccctgtcaccacacggaatagtgaatgtggagtgtggagaggaaggaggcagattcatttctaagacgcactctggagccatgtagcctggagtcaacccattttccacggtcttttctgcaagtgggcaggcccctcctcggggtctgtgtccttgagacttggagccctgcctctgagcctggacgggaagtgtggcctgttgtgtgtgtgcgttctgagcgtgttggccagtggctgtggaggggaccacctgccacccacggtcaccactcccttgtggcagctttctcttcaaataggaagaacgcacagagggcaggagcctcctgtttgcagacgttggcgggccccgaggctcccagagcagcctctgtcaccgcttctgtgtagcaaacattaacgatgacaggggtagaaattcttcggtgccgttcagcttacaaggatcagccatgtgcctctgtactatgtccactttgcaatatttaccgacagccgtcttttgttctttctttcctgttttccatttttaaactagtaacagcaggccttttgcgtttacaatggaacacaatcaccaagaaattagtcagggcgaaaagaaaaaaataatactattaataagaaaccaacaaacaagaacctctctttctagggatttctaaatatataaaatgactgttccttagaatgtttaacttaagaattatttcagtttgtctgggccacactggggcagaggggggagggagggatacagagatggatgccacttacctcagatcttttaaagtggaaatccaaattgaattttcatttggactttcaggataattttctatgttggtcaacttttcgttttccctaactcacccagtttagtttgggatgatttgatttctgttgttgttgatcccatttctaacttggaattgtgagcctctatgttttctgttaggtgagtgtgttgggttttttccccccaccaggaagtggcagcatccctccttctcccctaaagggactctgcggaacctttcacacctctttctcagggacggggcaggtgtgtgtgtggtacactgacgtgtccagaagcagcactttgactgctctggagtagggttgtacaatttcaaggaatgtttggatttcctgcatcttgtggattactccttagataccgcatagattgcaatataatgctgcatgttcaagatgaacagtagctcctagtaatcataaaatccactctttgcacagtttgatctttactgaaatatgttgccaaaatttatttttgttgttgtagctctggattttgttttgttttgttttttaaggaaacgattgacaataccctttaacatctgtgactactaaggaaacctatttctttcatagagagaaaaatctccaatgcttttgaagacactaataccgtgctatttcagatatgggtgaggaagcagagctctcggtaccgaaggccgggcttcttgagctgtgttggttgtcatggctactgtttcatgaaccacaagcagctcaacagactggtctgttgccttctgaaaccctttgcacttcaatttgcaccaggtgaaaacagggccagcagactccatggcccaattcggtttcttcggtggtgatgtgaaaggagagaattacactttttttttttttaagtggcgtggaggcctttgcttccacatttgtttttaacccagaatttctgaaatagagaatttaagaacacatcaagtaataaatatacagagaatatacttttttataaagcacatgcatctgctattgtgttgggttggtttcctctcttttccacggacagtgttgtgtttctggcatagggaaactccaaacaacttgcacacctctactccggagctgagatttcttttacatagatgacctcgcttcaaatacgttaccttactgatgataggatcttttcttgtagcactataccttgtgggaatttttttttaaatgtacacctgatttgagaagctgaagaaaacaaaattttgaagcactcactttgaggagtacaggtaatgttttaaaaaattgcacaaaagaaaaatgaatgtcgaaatgattcattcagtgtttgaaagatatggctctgttgaaacaatgagtttcatactttgtttgtaaaaaaaaaaaagcagagaagggttgaaagttacatgtttttttgtatatagaaatttgtcatgtctaaatgatcagatttgtatggttatggcctggaagaattactacgtaaaaggctcttaaactatacctatgcttattgttatttttgttacatatagccctcgtctgagggaggggaactcggtattctgcgatttgagaatactgttcattcctatgctgaaagtacttctctgagctcccttcttagtctaaactcttaagccattgcaacttctttttcttcagagatgatgtttgacattttcagcacttcctgttcctataaacccaaagaatataatcttgaacacgaagtgtttgtaacaagggatccaggctaccaatcaaacaggactcattatggggacaaaaaaaaaaattatttcaccttctttccccccacacctcatttaaatggggggagtaaaaacatgatttcaatgtaaatgcctcattttattttagttttattttgatttttatttaatataaagaggccagaataaatacggagcatcttctcagaatagtattcctgtccaaaaatcaagccggacagtggaaactggacagctgtggggatattaagcacccccacttacaattcttaaattcagaatctcgtcccctcccttctcgttgaaggcaactgttctggtagctaactttctcctgtgtaatggcgggagggaacaccggcttcagtttttcatgtccccatgacttgcatacaaatggttcaactgtattaaaattaagtgcatttggccaataggtagtatctatacaataacaacaatctctaagaatttccataacttttcttatctgaaaggactcaagtcttccactgcagatacattggaggcttcacccacgttttctttccctttagtttgtttgctgtctggatggccaatgagcctgtctccttttctgtggccaatctgaaggccttcgttggaagtgttgtttacagtaatccttaccaagataacatactgtcctccagaataccaagtattaggtgacactagctcaagctgttgtcttcagagcagttaccaagaagctcggtgcacaggttttctctggttcttacaggaaccacctactctttcagttttctggcccaggagtggggtaaatcctttagttagtgcatttgaacttgatacctgtgcattcagttctgtgaatactgccctttttggcggggtttcctcatctccccagcctgaactgctcaactctaaacccaaattagtgtcagccgaaaggaggtttcaagatagtcctgtcagtatttgtggtgaccttcagattagacagtcttcatttccagccagtggagtcctggctccagagccatctctgagactcgtactactggatgttttaatatcagatcattacccaccatatgcctcccacaggccaagggaaaacagacaccagaacttgggttgagggcactaccagactgacatggccagtacagaggagaactagggaaggaatgatgttttgcaccttattgaaaagaaaattttaagtgcatacataatagttaagagcttttattgtgacaggagaacttttttccatatgcgtgcatactctctgtaattccagtgtaaaatattgtacttgcactagcttttttaaacaaatattaaaaaatggaagaattcatattctattttctaatcgtggtgtgtctatttgtaggatacactcgagtctgtttattgaattttatggtccctttctttgatggtgcttgcaggttttctaggtagaaattatttcattattataataaaacaatgtttgattcaaaatttgaacaaaattgttttaaataaattgtctgtataccagtacaagtttattgtttcagtatactcgtactaataaaataacagtgccaattgca

SEQ ID NO: 110 - DNA, 142001 bp, Homo sapiens
ccccgtccctggagctcccactccctcccagacctccacaaaccttccaggcccccagccctaagcccggcaccactgtccacccttcgcggctcctgggtcctcaccgcgcccctagacaaacccggactccctctggtcccacccgcccttgcaccgcttctagccgtctcggccacccacgtgtgttcccagcccaccgaccacgctcccggcacaccctatagccccgcgctgcctccgggagagcggacggggaaagccgagggtctccgaggggcgctcgggctctggcgagaggaggaaggactcagggaagcagccggggaggcccggggctccggggagaggtcgggaaggccgaagcgctctggcgaagaggccggggaggccgaggggttcccggaagcgggccgggaggccaggggtctcaggggaggcccagcgggccgtgcagcgggcgcgtgtggcggcgagcggggcctcaccgtcagtcacggctcccatggcgtgcgcggcggcggcggcggcggcggcggcgcaagctgaggcggcggttggcggcggcggaggtcaaactcccacaatgcagccgggtaaacagccatggaggaggaggcggcggcgcccgcggccgcctgctccgacgcctgagccgcgccgcgccgcgccgccgccgccgccgccgccgccgcgggacccgcgctccccgcgctcccggtactccccgggggcggccgcggccggcgcgagttggggcgaggcttggcggccggcggcggccccggctgcagcccgggctcccgccgccccccttgcagcccccgcccggcccacgcccagaggccgccccggaggccgcagccagccgccaggtgagctcgcccggacgccgccagggctgcgggggtgcggcgggagctgcgggccgcccgcagtcggggtcccggcttcttccccgggaaggtgactgcggccccgccgccccatccagggtgacgctgctaggggtgggctcgtttccctggggggtggggagggtgacggggacgcccggatccggctgagcccaggagaggcgggactaggggtaccgaggggggcgcgtcgctgggggtccccgcgaagttggcgcccacgcgcgctggggcgggtctcgaacgccggcacttgcgcggggcgcggccggcaatcaaaaaaggccccgggttccaggtcgcgcggttccggcccctgcggccgcccccttccttcctgggctcggcgggtgcgggaaaaagggtgaaagagaaacttggcgacctcccggaggagttcgcgaagcgaccaggagcgtgttgccatcgtcctcacccggcacccaattccaccacagagtcgggatttcgtcggtgatcgtgatggggtgcttttatttttctctttgattttcaaaaaatgtctatgtgactgtccctatcttaaggggaagttgaaagtgggggcgggggtgctcaatgagaaacgttgccttgtgtgtagttgtttggagcacactgcaaattatattggcatctctttccaaaagtcactttgattcaacttcgatagctttctcgtaaatggcacgtttaggtggtgagaggtggatgaggaaacaggcaccagtgcagctgatttgacctccagtgggatagatacgattagcaccaggatcgtgtctcattttgaacccaggtttgttattttattcagccataccgttgttttccaattttcctgtcccccaagtagatcttgcatcttcatatccgggatgaagaagttgtgtaggataaacttggttgtttcactttccttactaaatttaggtacattctccctgttttcccccagttctttcaaagaggagaagttgcagatgcaaatgtattaaagtgaagtgtgtttaacctctagcaagaaatatgtacaattttagtcatattatgtgagaccagtgacttcaataataccattacagtgctctcaagaattagtgctcaagaacttgacttttgtcacaaagacaaaaattactttacatgaagattctgagatgtgacttgctctcccctaaggtatgaagtttccgactttgaaaaaatactgacctaaacgctggctgtaggtgggcatcatcagaccctgttcatttccttggttttaggagacagggcactctaagagaagaattgttttaaatcttaagtactacagattgtaaactgaaattgtcaattgattggggttcacaataccaagttgcattttggtggggatagttattgtttagaaagtaattgtcggccgggcgcggtggctcacgcctgtaatcccagcactttgggaggccgaggcgggaggatcacgaggtcaagagatcgagaccatcccggctaaaacggtgaaaccccgtctctactaaaaaaaaatacaaaaaattagccgggcgtagtggcgggcgcctgtagtcccagctacttgggaggctgaggcaggagaatggcgtgaacccgggaggcggagcttgcagtgagcccagatcccgccactgcactccagcctgggcgacagagcgagactccatctcaaaaaaaaaaaaaaaaaaaaaaaaaaaaaaagaaagtaattgtcatgtggtgaaaagttttttttaagtgtttcttaatcttatcataatactgattttgaaacagtgtcagtgatttaaaataatctgtaatattttcatgggaaagtatcactgccccctgtaacttaaattttcgtgagatactctctgagttattcataaatggagtgctgttcaaacatttctataagttaatttgataacctataattttgttggatgatgctagaaattttctggagtaataagaccaagaggaatttgaaagactttaaagtttgagctgtacctgaaaataaacattcctgaaagttattttatttttttttgagacaggaccttcctctgttgcctaggctggagtgcagtggcacgatcatcagggctcactgcagcctggaactcctgggctcaagtgatcctcccatctcagcctaccaactagttgggactaccggcatgttccatgatgcctggctaagttttttatttttatttttgtagagacatgatctcactatgttgcccaggctggtctcaaactgctgggctcaagcgatcctcccgcctcagcctcccaaagtgctgggattatgggtttgagccactgtgtccagcctgaaagttcttgactcaagtggtgggaaacacataatttgagcctttatgaactctaaaatctattttgtcagctacatgattttacttgcaattgcattgacacagatctattcattgaacatttaagaattgtcttttcatcatatcgtatatctcatatatatgagagaacatcttttagtaaactttacaagtggtcttctttttacatattaacatgttgatgaatgttaaagtagcaaagactcaagcccttaccatactaatgtttcttcttttcaagacagatctttatgggcagaaacacagaaatggaagtagcagattttaagaaaactgattcagactttgaacttgtatgaccttatatttattgatttatttgagtcataagatttctgggtttttttttttttgagaatatgaaagactagttaagaaaatttgtgtgtttatttgatatttgctttctgaaaatataaaaaattatgagagagctagctatatatggtctttattctgggtctgtgaaataatgtaaggaattttgtactatgcttttagagcaagagttatcctgggggtctgtgaccctccaagggttggtttcaagggattcctgaactccctgtagttgtgaccagaactttttgtgtatgtgtatttttctggaagagggtctgtagttgttttagaaaagagatccaggacttaaaaaaattagagacacatctttttattgaataaaatggaagttagaattcttttcttttctttcttcttttttcctttttcttttgaaacagggtctcactttgttgcccagtctggaatgcaattgcatgaaactggctcactgcatccttgacctcctgggctcaagtgatcctcctgccacagcctcccagagtgctgggattacagtcatgagccatcacagaatgaccattctaaagagaaaaaaacatttttgaaaagtagatctgtgtgctcgttacttgccttttaaagttatcttcaggctgggcacagtggcttatgcctgtaatcccagcactttgagaggccaaggcgggtggatcatttgaggtaggccgaggcgggtggatcatttgaggtcagaaattcaagagcagcctggccaacatggtgaaaccccatctctaccaaaaatacaaaaaaaattatctaggcgtggtggtgtggcctgtaatcccagctactcaggaggctgaggcaggagaatcacttgaacccaggaggctgaggttgcagtgagccgagatcactacactctagcctgggcaacagagtaagacactgaaataaataaataaataacaaacaaataaataaataaagttgtcttcagacttagaggtgtaaaagcacttccattttattcccacaacaaagcattgcctatcagttgataagccaagctggtctgacgtgctagtcctgcatgtactgtggctgtgtttttaaaaaattatatctaaaaattcagaccagatcgtttgatggtagataagcaaagatttgatcttgacaccagccgttggagtaaatgggtctttcagctccactctcttctctccagaaaatttgaaatttgactcaaagggaatcattgtaagaaaatgtgtttgtgccttggcaggacagtagaacatgatgggaaaaacacagtttgagtcaaaatagacttaaaattcaaatttggtttcctttattcactgtagctacttaccctgcttgactcttcagttactcatctggatatggctaactagtagagttgttgggaggctagctagaagtttcccgtataaaagtcttagctcctctttggcccgcaagaaggacttacaagccaggtttggggaaccattaataaacatctgaggaaacatgtatattcatggtataggataataagtacattatttccaaattggtgtgatgaagatattaacacttaaaacattgttttttaagaaaaagattttcaaaaatgagttaggattgagtggtccccaaatatagatatttagaggaaagtggaaaatgatggtttatttggcagaggggaggacatggatgctgctgggcaggaagaaatgatagccacccaccagcattatatttctctctgtgggcaagattccatttaacattttctcttcacttataatctgaattaaaaaactaaaatactgcacatgtactttatagtccatcacccctaaaagtgcttcagcactcctttcgttttgagaccttcacaggtaacccagggacttcatgggtggaagttacacttataactttagttgtctaattctgctgtctttaaaatgccttcacagttgggtacctgtgttgatttttgtcaataggaaagggtctggcaggactgaatcatattttactttaaatgctgaagtaagagagggcattatgagtcaaaagaaagtgtgagatacgtaaataaaatactgtataatgcttatggccataaaaataaacttgcttctactatttctatagtcttaacctttcctgtcatttattcgtggtgatcatttatgctttctgcccttgggttgggaaatggttatgaacacagcctttaggctttgaatatggccttgattctcatttcctgagctctctggttgtgttcaacttggtccagtctccttctttgagtctagaggagatgaccattaaatgggataataaatgcaaaaaagttttgcttactcctaggctcctagtaagtactcagaaagtggtagccattttgaagacagttacattctcatctttagaaggagatatcatacatctttttcttttcttttctttttgtttttttttgagacagaggctcattgttgccaaggctggagtgcagtggcatgatcttggctcactgcaactcctgcctcccagggttcaagctattctcgtgcctcagcctccctagtagctgggattacaggcatgtgccactacgcccagctcatttttgtatttttagtagagatggggtttcgccatgctggccaggctgatcctgagctcctgacctcaggtgatccacctgcctcggcctcccaaagtgctgggattacagctgtgagctaccgcaccctgctagagatactatacatccttttaaagagaatacctttattcatccttattcccacttagaccttctggaaccatcttactttcaactcagaaaagccttttacattttcttgttatgataggcaggtatcccaacatcttgatgacctattggacttctccattgttcttagccaatggggttgcattctctattggcctggcaggttatatcaaaatcttggatatgtcaggggccaaaccaacaagcctgcacaggtttggagctgtgatccatcaaacaactgtgtgattttatagcctggaacagagatcagcaaattttctgtaaaggaccatatagtaaatattgtttactttgccagccatccaggtctctacacctactcagctctgccatgatagcaggaaaacactcatagatataaatgaatgggtatgactgtgttccaagaaatgttgatgaacactgacatttgaatttcatgcaatttttatgtgtcacgtcatattttattttttcaaccatttaaaaatgtgaaagtcattcttagctcctgttatatacaaatcttagctagatttggtccatgggccataatttgcagaatccttgcctagaatattagatgcatagatttgtggcattgccaagcaaccacccccaacatgtgcacacacacgtatgtgtgtgtgtgctcacacactgctgttttatttagcatactctgcttttggtatggcagtttgatctaatgcctcatctctttggataggatgaaacttcagtcaataagtttttattagtcatattgtgtggccgccttagcacatgcatgattctgtcaccaattaattttatttattgttaagtgttctcaccttgcccatttttttatagagcttgatgattggaccctctcagatgtgatggtttttgaagggaatcagtgcttttggagctgtcttttgcttaatgttcctattaatccttctttgccgtggaagggaagtaattaatactggcctctcaagctgctaactagacattctttcctaaaggaaatctgtatcctggccttccctattccctttctgcatgatatgtttggctttataaagcacacaaaaattcctcttgtgttctaacccctggagattagctctaggattggtgtgtacagagcatgtagatatatatgtctgtgtgtaatttcatccggccatcactgaagctctgagggctgcttcttttagtttcaccttttcactccctctacctttctctcctggccattgtgtaaggatgcagatttggtgacctgataactgctctaactgattggtttattttttgcttcgtttcctgcttttcaacattctctactgatttgcttattttgcagcaagtacactctttttggagtttaccttttcaaaacaacattgtgctgaaaataaaaccactagagattatttgggtattgtaggatttttccccctccaaatgtacagtaaatacagtataagaggcatgactcagtattttagatatagaatgcaatttaaaaaattgtttgccattttatatatagatattagaggtgtaaaatgtgttcttacttttagcatttaagggtttccttcttgttaaaaaaagtaaatttgctacgtatcttttggataacagtttgggcaatatgaacccaaagtcattacaaaaaaagaaaaaaaggtaaattcacatctaggaatttaaagaaacagttggtgaagtatgcacagatgtatgtaccagattgctcacctgtcctttttttataacaaaacatagaaagtgatctaaatacctatggataggggattaagtgaattagggcctatccatgtagtggaatatgctgcaatctttaaaaagaatgatgcagtcaatatttattcatagaaaaaaaggtatataatgagactatgtataagatggaacttttagaatagggttttagtcatctttgaagtatatggaagaaaatgccaggagcaagaattgttacaggggagaatctgttttaattattaaattataatctaaaactataattttgattattaaacattattataatctggtttgtttttaaatttaaaaaaaaaacagattataatttaatgctttaattatcaattaaattgttccttttttttccttagccagttaccttcaaattcaactcacctttatttgcacctgcatctttgtggtttaactatgataattttagcaaattttcacttcagttattttggctttggagtatgttctatctcctatgccccacattctggtggagatacagttcattgtttatatgaaattagcaacattgatctagccttgacgaatgagaaacgtaaccacatctggctgtgacatagtgactctttgtggactttgggccttagagtttgttataggaaactttaggacgtgaatacactataaaatatagaaatattacgataattcatgaagcatgtctgtcagttatctattgttaacaacccattccaaaagtttgtggcttaaaacacataccattttatttgctcataattagggcagagcagttctccattggtagtgcctggcctgaggtcactaatgtggctgcagtcctcttaagtcttgagtcagaactagttagtcaagctgggctatctctctgagctccacataatctcatcttctagcagcctagatcaaatttcctcaggtggaggcactttgttccaggagggtgagaactgcaaggtttctggaggcttaagcttaagagtcacacagtaccactctgccatattctgctagtcaaagcaagtcacaaggccaactcaaattttaggagttggacaaagataccccctcttgatggcaaatgctgccaagtcatattgcacaggatagcctacagggaattgttgcagccatcaacatatgtgccaacctgcttttgttatagtaactaaactctgtttgtttgccatgattgataaaactctgttctgaggaacagtgctaaatggtttcctgtgttacctcttgggataacagctctacatgtaggtagtattatcccattttaaaggtatgaaaagtgagccttagaaaggttaagtaacctgccctagagcttttatctagttagggacagatcttaaaagttaaggaaaatttatgtctataccagtgtttcttaatcccatcactaaagaacttgcatgggggagggagagaggaagggtgggaagtgggaggaagcgtagtttttaaaatctcaaaatccattatcttaaaattttacatgaattttgtattctactctataatatatcccttttcaatgtgaaattcatggtttaattacttgccaatcaaattaaattttatccccccaatttttaagaaaatgcaattcttctagacacagtataacagctaatcagccagagatctttggttgtaagcagtaagaactaaatctgactactttaaacataaagagattactggagggatgtggtgacaacaatgccaaagaatcaggcttcagagtgaaccagatctagagcagcttcagggatccaggtagcaggactcagtagacagtcttctcaggatacaggagggccaacctctccagcagtttttaatcccactttctactgagagtatatctttcaggcccatactgggtcccagcaggtgccttggttattgcctcactcagccagtaccctttaggggagttgtcattccccagaagtgggaattgatggagggcaggtaaaaccaacagatatttactatctgaacatttgtgggccactatgagtggacttggtttagacattgtatcacatataagcgacaccataatgatccctggttcacccgtctccttcccaaccctacatctaagggttttgttttgttttgtgtttgaaacaagctgtccttctgtcacctaggctggagcgcagtggcacaatcgtggcttactgcagcgttgacctcctggcctcaagcagtcctcccactgcagcttctcaagaagccggggatacaggtgtgtgccaccaaacctggctaatacattttttttttcttttttgtagagactgtgttatctagactggtctcccatttctgggctcaagccatcctcccaccttggcctcccaaaatgctaggattataggcatcagccaccacacctggccccgaggattcttaaactcccatctttaaaagcattcttgtggctctacactgtctatttccatttaaccttactggtacttaccactctaaatgcaatactacatgtgttttttacatgataatctttcctaaaatatgcattttcctcatttttaaagaaaagcatatagactctaaccatttgttggtaacagagtcactataaacatttttatccagtgcatagtgatccccttagaacccagtgagataaagtttatggtctctgcactaaattttctcaaatttctctgcatttatttttcggtcttcttgtgtctaagtgctttcactgtaactttgctaatactttaaaatacgcatgttagactttataaaagcttataggctgaaggggcaacttacatttatttggcctttgtaagtatgagttaaaccacacttcaaatgataaaatgctgtgcatatacagtgtgattttatacagagcatttgcacgtatgttctcctgtttcattgtatattccaatcctttgaagtcagggaagaggagatattttctctatttttcagctgaggataaggtttagaaagggtgatttcccctccaacctaagactactgcagaattcaggtgttctgattgcccatgccttattgagggtggttctagaacagtggtttactaactgcagaagctccttttctggattctgaagtttccaggctgaactggagatgggtaaactaatgtttggcctcatttgagtaatgttccctaattgtagtgacgttggtgtgtgtcttagtctgttcaggctactctaacaagataccataaactgggtagtttgtaaacaacatacctttgtttgtgacagttctgaaggccgagaagtccatgatcagggtgccagcagattgtgtgtctgatgagggcttgtttcctgtttcatagaaggtgtcacatggtggaaggggcaaacaagctcctggacctctttcgtaatggcactaatcctattcatgaaggttctgccctcatgacctaatcaccctgcagaaggtcccacatcctattaccataacttggagggttaggattttattttatttattttatttttattttttgtagagatagggttttgccatgttgtccaggccggtcttgaactcctgagtggcaagtgattctcccacctcagcctcctgagtagctgggactgcaggtgcatgccattacacttagctaattttttgtgttttttgaatagacagggtcttgctatgttgcccatgctggtcttgaactcctgagctcaagtaatcctcctgcctcagcctcccaaagtgctgggattacaggtgtgagccactgtgcccagcctaggatttcaacatgtgaatttgggaggacataaacattccgaccatgacagtgtgtaatggtggtgtctagtagtcaccttggtaattagtagctgctgctgtttattcttgccttggaggcccagcatctttttatttccccacagatagccaggtgaggagctgatttaccccatctcttcttgccacaattagctgggtttgaagtacctcttggagcccttcgatctggccttttttatttcttttccctgtaattaccactttgtgatgtagtcactcgtcctttcagcccctggactcttcttttatatggtcctggctgttttctgctgacaggtctatcactacaagaggttttgagaggagcacttgacacttttgtttaattaaggtctccagacagttttctgttaatagcagggttgtatgttaggctctttccccccattacttttaaagtttcattgtagtctggatcataaacttgtctgtggtggtaatatggtggttcttgtttggccagacctttttgtaaatacacacatcccaagacttctgtagcttttggaaccttgttctgacatttaacactagttttaaagttgtctttttctaatttgtttcaggcactgatttctacagcttctaaccatgttttgataagcactagtcaaaaaactattttttcctcttgcatttttagtttgtttgttttttgtcttatggtttttgtagatactgtgagcctttggaatccttcaacttaattctgaaaagaatgcgagtaaagttctacattgaaaaataagtatttttcatttccttatacttttttcactggcatttttaagttttagcatactgaacagaaaggcatttttagtgttctggctcatagctcctcttagctgctctaagaggagatatttaaggctcaattctctgtgtcctccactccgtaccctgtttattattattgtggtagttataactataaatcatttgcagatcgaagttagaaaagagaccatttgtcattacattaagacagtttaaaggaatcgcttgttcaaatttactagcttcctgaagctagtaaagatgtttatggtttccaagattccctgttaatatatttcaacactacaagacagtgaataacacatgttcagctattatagattatgaggaaagctagctcctagaaaagatttttcagtactataaatggcactaaactgaaaaatcagttgtcataataaacagcggtcctgatctgagagtaggcaggtttcttggtgtgtctgtgcttttagctaatggccagcaatgagtagctctcttttccataaatctggtatcaagtattaatcagctgtagactggaaagtttttatttgctagcatttgtagtggaggaaacaccagtctgttttatctgtctcttagccatataactgcatatgatatcatctgcatggcgttcttacagagagaaatagttgtattctttttcatttgtagtcggagtacttcagaatattaaaatagtgaactttgaccttgaagcatctaaattgtctcagttaagattgtgatgtataccagaaaaaatttacaccttaaattcaatttagcattcttgttttgcacattttgaatggtttttttaatttaagagcaaagtccatagaatgattgtactattgaaaaatcttaaatctcaaaagctaagaaaggtaatttagattttaagtttcaagaattacataaatttgggtcttaaggaaaaactgaaattcctgaatgcttacagaggtttttgtttaattttttttcgtgattacagaaatcataagtgtttgtagaaaactcagaaaattccacagatagaaggaaataaaagttactcatacttctacccagagatatcactattaacattttatgtatatccccccagctgcttatagagttctccaataaaatatactttgaaatgcatgcttagaagtaagggtagaagagtggtagaaatgggtacatagtgtgaaccaaattttgttaatcctactgcttgtcagactgcccgccaggtgttgccttcaggctgatgagagctgcctggccctttggccagctttggctgatttgcagcagagcatcttttcttagacaactgtctatatctgtctgtgtctttatcttagcaactgtttcttgtcagctccaaatgcctgctggttgcagagagagacatttggggtccttgttggagtggcttattgatatgagccataagttcttatcaaccccgtggaaaaattctttaaatcagctcttattcaaaagaatgcccgaatattcacaaatatagtatccttcagattacttgcaccaagtaacagcaaggtatttagagactcccaggtgatttcaattaacatctaacctcaaatccggtctccttggtaagagaaaaatccagagaaggagctcaaagcagattatggtataagcatatgccagtcctctcctgtggaaaaagaaaagtgctaatctggtcagaactgttaaagagacaggcaaggctgagcacagcagaattctctcatcctgttcatcttttgcattagtgcagaaaaaagatttatctcaggatgaaagaaagaaggaaggatggcaggcaggtggctagtaataggagatggttggttctcttcctctctgcctgggctagtggtaagcaggtcctcaggtctgaaaaactagtaaaagtgaagtgacacacagggcagcttccccaggcagtgatacaacttgttggtattcagtgtgaaaatacaaagctgactttgattccttgccatcagccagaggaaaccctggagaagtaggaggcagtggcatctctttgtaaacattttattcttgacaagtaacagactcctacctagagaattgtaagcgttggcccctccattctgccagctgtctttcaagagcactctcagtattctcctgcactgaccagtttaaaaggtgtcgtttctgctcccatgcagtgcttggtgtgaaggaattaatttgcaagatgaataaccattgtgataactgctcacatgcaaaggagagagattgctgattttacaggtgtgtggtttgctttcttagatctggcaggaaacagagtccaactcagatggtttaagagactttaaatgaaagaattattttcagaaggacgggcagagttcaggatgacatgggtttctgtcacctagaaactaataggaatggcaagctgttatcactgctagatctgagggagcaaagagaagaaatagtgttactggagtctagtgagagctggtgccatagtggatgggctgttaagacaggagctatagtactagaggcattcagccactgccagaaaagggagcccagagcagggagggaacaaggagggaatattctcctctctgacttttttctttgctctttgatctttttccagtgccttctattggccagactcacctggaagctggccagcaggtgaatctatgatgctgcccatagaggtcagcctcttgggactcagcagggcccagtatggtggaaagttggtctgggggtggaaagtggatcagacaaaattataccataccctatagcatattcttaatttcactttcatcattttatctcatcatcctcatctcctgaaatcccaaaataaaccttaaagcatgtgaactattgattatgactcagttctatcttttaatataaatagcccaaagagttaccctactcttatcagagaaattaaatattcaaagagagaatctgaacagttctcagaagaattggaaaatcactgaaagaccttctgttggggcattttgttcttggttaaaattaaactaacatttaaaaaatatgcatatgaactgtacaagtgatttatcttaaaatataaaacttgtacttttaatgacacattgctgaaatgtgttttttattattaaggttaaggtgcaaaaggaaagtgcaacttaagtccttatggattatctcttcagtttttttttttttttttttaaatagagtcttgctctgtcacccaggctaaatgaagtacagtggcgcgatctcggctcactgcaacctctgcctcctgggttcaagcgattctcctgcctcagcctcccgagtagctgggattacaggcgtgtgccaccatacccagctaatgtttgtatttttagtagagacggggtttcactatgttggccaagctagtctcgaactccggacctcaggtgatctttataaggcagagtgaattagcaaaaagattcttattccaccgatctagaaatacaagaacagatgtggccagtcgcggtggctcatgtctgtaatcctagcactttgggaggccgaggcaggtggatcacgaggtcaggagatcaagaccatcctggataacatggtgaaaccccatctctactaaaaaaaatacaaaaaattagccgggtgtggtggcacgtgcctgtaatccctgctactcgggaggctgaggcaagagaattgcttgaacccgggaagcaaaggttgcggtgagctgagatcgcgccactgcactctatcctgggcaacagagcaagactccgtatcaaaaaagaaaaaaagaacagatttttagcttatcaaaagagagtctgttttagtccataactttattgagttttgaggtttgagaaatgggaagatgaatatttactctgtaaatatgaatggtgaaaagaggtccacacttacctataataattggtgctttaataaaagcatcagctgtgggactaaaaaagagggaaaagtgatgtagtctgtctttatcagagattcttttagacaggtcacaaatatttatcaaaagtctacagttgccgtgtcctagaagtacagatgaaaaaagtgccagatagccctgactcaaggagttggtgtcagagtgagcctttcattgctgtttccttaagggcagccagtcttttggtgcctttccattgcctagaggaaggatgatatccaaaactttgaacagatctttcagtggtcctctgatctggccctgcctgcatcttctgtctcaccaagtgctctggctttttagttccttgaacttgctgttcttcctcaatgtcttttctactgagatttcatttgtctggggtgcttgctgccaccctcatctccctcatacctttttgcctcctttaaatgccacctcttcacagaagccttccctgaccttctagacaaaattcagtgactttgttacttgctttaaaaccctgtgtattcagacacgccgcccttctcattcaaagcactctttcaatttatttgtgtaaaggttttatggctttctttcctactagaagtaaacaccatgagaacagcgttcattgctgtctgtttcacagctgtctcctcagtgctgagcatggcgctcaatagatacttgcaaaaaagggaaaaagaactgctttcaacccaacccctactactcaccagttgtgtgacctttagtggtttgcttcttggagtcgcaatttgttatctgtagaatgggaataatgatgataatggctatcatttattgagcagttagtatgtgccagactgtgctttacttgcattatcttttcagttaaaccccatcagagaagtgaaaagatttgcttgaggtcacatagtttgaaaatagaaaacaggatttaaactctggtctgtttaattcaaaaaaatggattactcttagccatgcctttttgtgattgagtagtaccaatgctgagaatgctgaggttgaggagggagtaggtttggaatctcctaaaccattttagggaatcggtatgggattaactctgcctatttgaagagataagtgacctctaaactgatttctgaagaagttagttgggtctagaagcagccagaagtgcaaatactctaagagaacttttcagtgtgctggaaactggccttgttcattgtggttggagcattttttttttttttttttttttgagacggagtctcgctctgtcgcctgggctggtgtgcagtggtgcaatctcagctcactgcgacctctgcctcctgggttcaaatgattctcctgcctcagcctcctgagaagctgggattataggtgcccaccactatgcccagctaattttttgtatttttagtagagacagggtttcaccatgttggtcgggctggtcttgaactcctgacttcgtgatttgcccgccttggcgtcccagagtgttgggattacaggcgtgagccactgcacccagccgcttgattggagcattctacagggctaagaactataaggttgggccagagagtaaagtaaaggggcttaccggctgctgggccaggctaggccagggagttactttctgctaaacactgtggggagtccttgatggattttatttgttgaaaatactttggaagcaggaagtcccaatttggagtccatcttgggggcagaagtatccaaagcccttctctcagtttgcatctctagcaaagaacacattttaactaataatttcattctgctgcacccagtgtgacagtgtttgaaaaggaaccagcattgtgaggtgaggaatggatttttatgtttagttgcagcagtataattttgctgctgctgttactgttttcctttggggacagattccctaacccagatggatggcaaccttacacaagttacttcacctctctagcctgtttctcatctggaaattagagatagttaaaatatctatcttgtcagcttgtcgtgcaacatttacacagtgcatggtataaaatgaacttttaggcaacattaacggttattgtttttaatatgacctatccattctggcctttgattcttttttttttttttttttgggtcggagtcttctctgtcacccaggctggagtgcagtggcacaatcttggctcactgcaacctccgcctcacaggttcaagcaattctcgtgtctcagtctcgcaagtagttgggaatgtagacatgtgccaccatgcccagctaatttttttttatttttagtagagaccgatttcaccatgttggccgggctgatcttgaatggctgtcttaaggtaattcacctgccttggcctcccaaagtgctgggattacaggtgtgagccaccaaacttgacctctggcctcttaaatgaatatgtgttgtttatttatcagacaggttgattgggacataggtgctgacatttttaaagatcatgattttaggatcttagaaagtaaaactggcaattaaaaaaggcaacgaacaccttagtgaggcagttttggtgtttcctagatgtgtttaggatgaacacatagatgaaatgcataatatgaacatgagccagtacttaaagagctcgtggtgtgtgccaggagtgtgttttccatgcattcttcctgagaagtaggtttgattatacagtatctattttacagataaaggttgaggtcttttctttctaaggtgttattagacagctatagacatggacaccaaaacttgttgagccttcagcattgtaaaggcttggcttaccttccatcaacctcagcagttctgctggaagggaaaaatggaaacagggcccttaattttttctcattattggattaattggaagcactaggcatggtgtgctgcctggtggatagtagaggctcagtaaatgtttattgaatataaatctgaatcagaccaagtgaaaaaaagatagagaaaagcagtattagatcctggccccagactttaaaaaagtctgaggtcaccagagattttattagcatagtccatttgttaatattgcaggttaatggttggttgaaggctgaggtgaagaattgtccagtgtgtgttgcatgggattaactccagtctgggcaatttagttatctctagaaatctgttcacttcccactaggtacccctgctgctcaagaagctccaggctctgtgtttgtgttcagctgattcatttattcccaattaaaaaaaaaaacaaactagttgtaacattaaaatatgcaaataagataggtgtgactatcctaaataatcctatgtaactattctatttaaacataaataggaaggtataactgccataagtcatcacgagtgtatttcaaagccagatctgattgatatttctgtttacccttagctcaggtaattaagagttgacaccaaggaagtatcatttagtattaaggggagaaaataggataccttattgcatagaatagcaaacaagtagcatttaattctagatttcttcttgtttcccccaacaacagaaaaaaaaatatttttttctcctgggggaggttgattaggatatttatttaccctgtcaaacctgaaagtcagatggtagcctgattaccaagcttgattgattaccaagcatcctttttgtgatttattattttatgccacaaaaggaagatacttgaagagataattttgttcatttactatagaagtagttcatgtagaaattttaaagtgtcaaacattaagacccagtgtccagatcttggtttctaataccattctccattaaaaggagattctgtgcctgagacagggaataaacaatatgagcctgtagtatcttctagctccagaaagtaagaaaataacatgcgcacacacacacacacacacacacacacacacacacacatactctcacacacacacacactcattcactctctctctctccacacacaatgatggggtgtgtcagagggaccaaagagacaactgaaagagctcccaaaggtcaaacctagaacaatttgagcagctaaaaaacatagtattagattgtaacccaatatataaaataaatgtaaataaaatatacagtatatatatttttaaaggctcatataaacatataaacaaataatatgtgatataaaatcataaatatccatgaggccatactggtataaataaatggttggataaataagcaaatgggagagaatagataaatctttaatataaaagaactccaaatgatttatgcagataatcatctctcaaggagatggaacatcactgccaatctttttttttttctttcttatttttttgggggggatcaggttctccatctgtcacccaggctggagtgcagtggcacaatcttagctcactgcaacctctgtctcttgggctcaagggtgtcttcccacctcagcctccgagtagctggaactacaggtgtgtgccaccatgcccagctaattttttttttttttgtattttttatagagatgggattttgccatgttgcccaagctggtcttgaactcctgggctcaagcgattcacctgcctcagcctcccaaaatgctgggattacagttgtgagccaccacgcccagcccactgcccatcttttaagtctgagctgtgcctagtgacttccttccaaagagtgcaatatgaaaagggaggaaagagacagcttcctgacattggcctgggcagtgactttttggatatcaccccaaaagcacaggtaaccaaaaaatagaaaaatggggttgcatcaaactaaaacagcttctgtataacaaaggaaatagtcaacagagtgaaaagacaatcaacactatgggagaaaatatttgcaaaccatatatctgataaggggttgatatctaaaatatataaggaactcaataacaaaacagataacccaattaaaaaaggagaaagaaactgaattgacaagacgtacagatggccaacaggtatatgaaaagatgctcaatatcactaatcatcagggacatgcaagttaaaaccacagtgagatatcacctcactcctgttagaatggctattcaaaaagacagaagataacaagtattggttagtatgtggagaaaagggaatctttgtacattggtagtggggatgtaaattatagtacagccattaagaaaaacagtatggaggtttctcaaaaaattaaaaatagaaaagaactatatgacccatcagtcctacttctgcatatatatccaaaggaaatcagtatgtcacagaggtatctgcactcccatgttcattgcagcattattcacaatagccaagatatggagtcaatcttggtatccatcaatggatgaatggatacagaaaatgtgatatttaggccaggcacagtggctcatgcctgtaatcccagcactttgggaggccaaggtaggtgaatcatttgagaccaggagttcaacctagccgggccaacatggtgcaaccccatttctactaaaaatacaaaaaattagcagggcatggtagcatgcacctgtagtcccagctacttgagaggctgagccaggagaatcgcttcaacctgggaggtgaagtttgcagtgagctgggatcacgccactatactccagagcgagactgggtctcaaacaaaaaaaggaaaagaaaatgtgatatccagtgtatatatgcaaataatgtaagactgttcagctttaaaaaagaaggaaatcctttcatttttgacaacatgggtgaacctggaggatattaagtgaaataagccagacacagaaagacaaatactgcaggaatctcacttacatgtggaatctaaaaacattgaaccacagaagcagagagtagaataatggttgccagaggctgggagttgggggagtggtgagggaaatggggagatgttgatcaaagagtacaagtttcagttaggatgaatgagttctaggaatctgttacacagtaatggtgactatagttaataatactgtatacttgaaaattgctgagagtagatcttaaatgttctcaccccccaaaagatgaggtgacagatatgctcattagcttgatttaattattttataatatatacataaaagatcatatttacactgtacaattttgtcactcatgccttaaagctggaggaaaataaataatcacatgttggtattggttcattagctgtgacaaagatactatacttacataagaggttaacaatagggaaaaccaggtgtcaggtttacaggaactctctgtataatctttgcaacttttctgtaaattcaaagtcatcccaaaattgaaagtttatttttaaaaaagactatggcaaggacaatagtctatagttcaagtttaattttcatcccgtagggagcctgaggtaaataaaatagtccttagtgttctggtcttattatggtgtaaagtggggcagttcttccttgctgttgtcttataaagccatgacagtttgtttgcagaatcagagaatgcagtatttctaaatgtcctcctgtggaatttcctactggcatgacttttttcccctttgcttctgcccagtagcagtcccttgagtggcatttgctgtcctagttaatcagagggtaggagaaatgaaaaactctcatcttcccactcccatgaagtttcaatgggcactggaaatgtaggtcaaattgcatcaccatagaaaggagcgaacaggaaggtatttatgaagtgctgccaatgtctctttagattcagagtcatgacgaactggtattgagcccgttaggtgtgagatacagggaatcagggggcatgtttgtgatgtagtgccagaatgttatatttcaaccagtgataaaagatctctgtctgaaacctagtggaaatgacttacactggctttgtttaatttgcatctcccagcttctggaattctttttgtctcttatttattattggcacattgcaaaaatttgtattaatttagccagagagatgtttgaagtgtagaaactattgccatgtatacattttaagaagtctattgtttcgtagtcacataagtctaataatatattttggaaattacgtataaacataagcacagtgacatcttgattagcacatagaaacctcaaaatattttttcatttttaaattatgtttaaagtatctgttagatggatctctgttttattatttattttattttattattttttctagacagggtctcactctgccacccaggctggagtatggtagcactatctcagctcactgcagcctcaacctcccaggctcaagtgatcctcccacctcagtctcccaagtagcagggactacaggcatgtgtcaccacacccagctaatttttgtatttttttgtagagacagagtttcaccatgttgcccaggcaggtctcaaacgatccacctgcctcagcttcccgaagtgctgggattacagatgtgtatcgctgtcctcagcctctgtcttctttttttttttttttaatggaaaaatcttacagattttaggatataaggaaactttaaatacgtgtttttattttttacatattgtgtgctacctactcctttgtaagatacccagatattgactgccagaatattctgttactgacagtgttatgaacagtaagcatcctgatagcaaaaccaagtctaaaacctctattttcactcccttcttctcccatcaagataatcagtagttgctttatgtacaaaatggaaagtcagatgataagagatttttacagaggcttggatattatttaataatatgaattgaatagattattctgtggaatatgtttataattcaacatggttttggctattttttaactttttattttgagataattataaatttataggaatttgcaaagatggtccagagaggtctcggttattcttcacccagtttctcccatttattatgtcttaactatagtgcagtattaaaaccaggacattgacattggcttaaagtacatatatggttctgtgtcatcttatcatgtgtattttcatgtaatcactaccacaatcaagatatagaactattctatcactaaaaagatcttggtcgggcgcagtggctcatgcctataatcccagcactttggaaggctgaggcaggtggatcttgaggtcaagagatcgagaccatcctggccaacatggtgaaaccctgtctctactaaaaatacaaaaatagctgggggtggtgtcaagtgcctataatcccagttactcgggaggctgaggcaggagaatcgcttgaacctgggaggcagaggttgcagtgagtcgagatcgtgccagtgcactccagcctggcgacagagcgagactccgtatcaaaaataaaaattaaaaaaaacagatctcccttgtgctacccctttatagccacattcattcctattatcctcacagtccctaactcctggcagctgctaatcggttctccaactctaaatttgtcattttgggaatgttacataaatatgatcttttaaaattggcttttttcacttagcattttaaaaagaattttatttttaaaagaatatgataaaatttttaaacgaatatttatttttttaaagttgttacccagagtttgattcactaattttaagaccatatatttctagcttgggtgttccatactctgtgttgctatatttgaacagcagctaaagtcgaatatgccgacgtaatagctgattatagcattaaccttattgcctgctgttaaggatgataccttgatgttaaagggaaaattaccctgggaaaagtccatcctatcaacaaagtagatattacaattgatgaagagcaggaataagaagtcccaatgtttataccaaataaagtaactgaccatatttgtactccatttcatcttgaaatcttcaaaggagagagactttttggaacatgatatttaaatgaacagcagttgaaatatttacattaattaactaatgcaaagcttatgtcacagaattgtggaatgtcaccatacgaaatcaagtgtctgcatcatgttaagcttctttgaatgtcttaagtaggaaatggagttctatggataggcaagggctagaaatagcctcagaaaaatcaaatcttcagatgctggtatactattttctgacaaaatacggagaatattctaggatctataggagggcatgttagtgtttggctgcaaataatgataccatggctctagggaatgccacatggtcaaacctatagcactgagcaaatagaaagtgaatcccaggataccattctgcagcacatggcagtgaataagcactggctcctcagcttctccagaattcatgttcctgaggttgtgtcaggacagatttttatgaatagggtaatcttgcaactagcaaatgatttttgtttggccctagctcctaacattttagatagtcttcctcccagttgggaaaatattcctggtaattaaaatcatcctctacttaccagcttaacatttttcccttgatcacatttgttttctttaagcagcatatgattgtacttaaagtagctattgggatagaggagaagggaaacaatcatttattgaccatcagctatatgccagccactttgctaagtgtttatgttcattcatgcatgtaactgcagtattgaaaaatttcattaatgatactcattaagttatggatctgaaataaacagcatcctaagcaactgtttgtagcaagccaattttcttggtcagatttactcaaggggtttgttgaccaaaacacagtagagaaagagtgagacatagtgcatatatgcctgtgagaaatggtttaaagaatataattatatctattaatttgtatattcatgagacagtgtgtaaaatgatacagaatttagacatgtaagacccagcccctctcctcttagctgtttatccaaatgagggaaacaagttttgagttaaaggaaaatatcaactaactacaggacttaaactgcttaacccatcaatgtaacatgtataacagggcattacataattatttttgaaatctttcagattgtaaatgctttaatattcagaagaggaaatgattactgatctctgacccttgattttgttatctgtatgattttgctacctcgtagaagtaaataaaataatgtatataaaagacttaatataatgcctactacttagtataccttcaataaattgtagcggttgctgttggtaatgaaaattatgacgatagtaagaatactttataagagtaggctaactgctataatgacccaaaaccccagtgccttaacacaatataatgtttatttcttgtttaagctcagagtgtgttggcaaggaggctcagagtgtgttgattcccccagtcattcaggagtgaaattgtgtggctctgccctcctgtaagtacttggagccctttccatttgaccaacagagggtaggagagactgaagctcaagccagagaggtttgtatgggcctagcccagaagtgtggcacccaacatttctttttttattttattttattttattttatttatttgtttattttgagacagagtcttgctctgtcacccaggctggagtgcagtggcaccatctcggctcactgcaacctccacctcccgggttcaagtgattcttgtgcctcagcctcctgagaagctgggactacaggcacgcagcaccacgcctggctaatttttgtattttgagtagagatggggtttcaccttgttggccaggctggtctggaactcctgatctcagtgatctgcccacttcagcctcccaaagtgctgggattacaggcgtgagcgacgagcgactgcacctggccccagcacttttttttttttaagagatggggtcttgctcttttgcactagctgaagtacagtggcacagtcatagctcactgcagccttgaactcctgggctcaagtgatcctcctgcctcagcctcccaagtagctgggactacaggtgtgagacaccacacctggctaattatttattttaattttcatagagatggagtctcgctgtgttgcctaggctgatctcgaactcctggcctcaagggatcctccctcctcagcctcccaaggtgctgggattacaggcgtgagccatcacacctggcttacacaacatttttgttcacattttggattcagtcacatgtctctaccttactgcaatgaatattgggaaatttaggcaaactatgtgctcaggcagagaatgtaaatataggtgactattggcgatctctatcacaaatagtatttacaaaggcttagtagaagtggaagcattttccctggatcttttagagaagagtgaaatttgttgtgtgctgctcagcctgtatttaggaggtaatatttaaagaggtgggtagaataattaaaaactgtacgagcattattaatgaaaactacatttatcccactagccactgcccttactgtcagtcatttggtaagtgacctttgggaagccatttatctgttacagacctgcatttcctcacttacaagtattctttgtagggctgtggtgaagattaaacaagacagtgcatgtacagagtttagcagagggtctgatccaagttaagcactcagcgaaaattgttcttattggtagtgttgataagtatggcctcagagtaaaacgcgtgctagctgttcatttatttaacatctatcctaagggaccatgctagactagcaaagaatgacttgactgaggacacatatatgaattttagaattttgtaaccccaggccagtcataggagattaacgttcccctggtagactattggggaacaaactctctctgttccccaggctttcctcctcccagtcaactttaaagacacctctaccacacacacacacacacacacacacacacacacacacccgccaactcctgtcaacaggagtactggactttaatttgcctcttatcgctccttcacacacacacacacacacacacacacccacacacacacacacacaccccaactcctgtcaaccggagtactggactttaatttgcctcttatccctccttctcccttccttagcattgatgtctataggtgagtttgcctggtgagagtgaaggtaaatgccagagcagctctttattccactggcctaattgcgggttcttagcaaggcaatagcatcccactccaggcacatattaacctgagtggctgggtagccgtcaggacctgtggttccattttatccaattcaattcatcaggcatttattaacacttaacaacattgggccctagggatacaagaatgaaatgttgcagacccagcctccaggaagcccacctagggcagtaggcatgatgacctgatgaggtttcatctgagctgggttttgaagtctagatgtgagttacttggaaagtaagaaaggagttcaaggaggcatgaacaacaggtgtggagaaacaggtgggaattgtggtgtattgcagtggagggaatggttttaagctcaactctaacatgcactacctcagcttttattggcctcatctcacaagcctcaattttctgataaaggagcacagaaagagttcctgtgttatagatgggaggtctaagtgaaatgatgcatgtaaaaggcttactttttattactgggcgcatggtaagtgttcagtaaatgtcagctactactactattattattgtcatgtgcttttataaattgactttcaaatctactgacttgatcagggttttgcacaatgacaaattggagaattactgggaattttatattttacttttagctaatggtgaaatggtgccctgtagtcacaaataatggatagaaaaatgccttgctgacctttctttgctaaaagaagagggaacctagttaacctcagtgaagcctgggagagataggctcaagatgggagaactgtgtgtcctgaaatggcaaaagagtgaaggatggctatattgaacatatttggagagagcagagggactgaacattgtgtaggtatatactaatagaagctgttagaaaatggaggctcctttaaaaataagactccacatgaggcgttctacgaagtgttgagaaagccctaggactgactgcagtggctgaaatgtactcaagaaacccaggccagagttactggagcccttcctcacaattggccttggctccctctccacttgtgtgttttcacattgacttgatcttcagtggagtaactctgagcagtggctgtagctcagcaggtagaaaaactctctaacccttgaagaggggaatacagtagcaccattgaaaaaagaggttgtgtatagagtttcattcttaaatttgctttgccaaggagaaagcctgtgagagtgaaagcaaggtggaactggggtccaaagagagggagtaaactagatgccatattaatttgtatttctggagaatatgactgcagtttatatataacttggtttaaacatttttgtaacctgcttaagaaatttgggtttgggtggtcgattttcatttggaagaaaagattaggaagacagtatagttttggggacacaagcatggctacctacaggagacaggtctgaaaggaaaataagtgatgcagccagctgagtactttggaaattacatgccaaatgacaaagggcagctcccaacacagcttcattcagttatccccctccaggaaagttggcccctgtggccagatttttagatttttcccagagaaaccaggagtttggaattttatatgaatcttccagccttttaaatattaacaacaaagtcatattgttttccccaagatcaccatggaaaacaaaaaagtgggctattttaggcctgtggacttttccatttgcagtgagtatcaagatggagagaaaaatgcacagcctaggagttaggtggctcagctgaataacactgccaattctagtgccagacacagtacttggcatggagcacattctcaatgtgttttgttttgtttttgagttagagtctcattcttttgccccaggctggagtacagttgcatgatcatggttcactgcagcctcagcttcccaggctcaagtgatcctcctgcctaagcctcctgaggaactgggactacaggcatgcaccaccatgcctggctagtttttaaaaattttctgtagagacggcgtctcacccttcctcaagcagtcttgaactcctggacttaagcagtcctcctgctttggcctcccaaagtgctaggattacaagcatgagccactgtgccccagcctcaacatatttttattgaataaataaaccagctgagataaatctctcttggttttcagtctttacatatctagaatggagagattggagtcagccttcaaggtttcaggttgttttttttgttgttgttttctctccctcctcctcctcccccaacaagctctgaatttataagatcacaactctttgtgctttccttgtaggactaatttctctggctccttttcttccctgttatgccctctccaagaacctagggtggcagtctcacgttaaagcttggcgattttgcctagaagttaagaatttaagtttatactgttaaaaacaagactgacttggtttagccttttttctttcgtttattgtgattagtaggtttgtgcttaattttgacacactggatgacataacgaggtgattcagattatgccttaaattgcaacaaagttctgaatcttaacagaacacagaaatgttactcctagaaaataagccattttccctgtaaaagccaatataacactgcccatgtagcattgtaggcttttctctgtttaaaaggaatgatggggtgtttctgaacccttcggccttctgcagtatattcttttataacacattctggtgatagctctacttttaaaatacgtttttttactatcttggacaagatcattttttgttgcagttatcacaaatcagttccaaaaaataagctcattaaaaggtgggggcgggggcacttaccctagatgccaggggattcttagaaccctagggaacctagggaaggaagtgctttgggccactcaggggctatggcagtaacaggaaagcccaagaacactcccaggcagagattctctctctctttctttctttcttccttcctttcttcctttctccttttctctctctctctctttctctcttttctgtctctctcttgtttctctgtctctctctctctctctgtgtctctctctctctttcttgttttttctcctgggggaaacgggagataagtggcctcttgggtcagattcactctgagcagcacattcattctttcattctctctttgctgactgtctttttcctatagactgagagagcacttagaggtagcttgcagcctccaccaaactagaccctcttcatctcaatttctcgttctaagaagaacacattgactgtctcagtttgtgtcgtgtgtccagctttgacaaagatgggagtaagtagtttgtagccccatagtacaagtatgacttggcatggagttgagaattacttagtgcttagaaaaaagggtcaacataggctagggagctcctgtaggataaagatatcttctataatctccctcccccttaaaaaaaaaagtaaataaatttatgcttcaagttaggtcttctttctttctctcccactgctaactggccatcatttaaatacatcttttttaaaattatatttattgaatgcttattacaaagtagttgttgcatgaataaaaggtatcaagtttaatgattctaagaaaattttccaagtctatttaaaatgatttctttttaactatttctctttgcaaaacaaaattaagttgccattgaggcagtttggtgtactggaaagggaactaaatatcaccaaaggcccggattctagttacagtttcacaccacttgttggctaggtaatcttgagcaaattatgaccttcctcaatctgtttcttcagtagtaaaatggagatcatagtaacagctcttttgaacacagggttattggaagatcaaatgagagaaaacatacaagcatgtaataggttttttcccatactaaagaaaggctcttgacccctattctaagtagagaagtttctgtttttaaatgtttatttttagtaactgcaactatcatttttctctaagaattggatttcctataaagcatttttacagtatgtgactagtaagtgatgaattcttttaaaaccaaaactatcctgaaggagatttcatagtattctgaatctgatgacttccttggatactttggagaaatagcagcagtgtccagatggaaaattgaaaaatggcttgacctagtgaaataagatcaagtgcagagtctaatctgatgctggtgttgttctgccttcaccttctgtctactctgaaggaatcaccatcagggtggtgaatgcttatcatgaacataacatctttattgactgtctctatcatgacaatttgtaattagctttgaatgatttttgcacagctataaagtatttaggattcaaagaaatgcattttggctcaggacagacatgttgaacaagaaaacagcttttattggaagtaaggcagaaaaggagcactaaaatggaaatcagagaaattttttaaaagaaaggagactgggaaggaattagaaatctgaagagaaacatctggtttataaagattgtgagaatgattttaagcattactgaatagcattttgagtgaataaaattgacacttttaaaaagggagagggaagcagtatgacctgggaataacttaaaacctaataaagataattatgagtaaatgttcaaaacatggcatataatttcagccactgattttcagagatgctttatttgtatcttaggatctcaggccataggaatatttggttaccatcttagagtacatgaaaataaataaaagttgagcaaagcactattacctcctccacatcttgctttatagccagtgagaattatagggagagaagtatatgagtagtgaatttttcatgtgagctcagcctgtcttgtgctttataccttgacaacatctgcccgatagctgtgtcattgcccatatttgtcgctttttctcttctgctgcatgtgagatttgaagaccagcttattttctaactttggtttgttaatctgtaatttattgactccttaactcattgctcctccacaaattaattaaaaagttaccacattttacctgaaatatatgcacacaactatgaagataatggagcacatagtttccttgtgctttttaataagatggtttaattgaattgttacctgttgaagtattaaaaattgcttttataaactgctgaaatgataaagaacgacagcttgagctctccagataataatctcattcaatctgtgtttttaaaatctgtgatttgacaagtttcataggagcaggctttctgaatcgccattttaaaaattaagtggaaactcattagtgcaaattatatacaatgattttaagccccaggaggctaactctgtgtacatattgaatagtcatttgttcttggtttattgtaactatagccaattaagttcattgtaaaaaaaaaaaaaaatcacatttgtagtaaaattggtaaaatgtcttgaaatttaacagtttgacatctcaaagcacatataattttggaatatctggcaaccaatgagattgtatgtttctgattagctttgtccatccactgtttcatccatttgccttttttctgtttttgcagatctgaacagaattaagacgaacgagctttcacaattgcagcagatgaagatccattggtaaattgatcaggatttttggcctaccctccaaagaaaaggtaactggctgttctgatatcgcaaacacagttgaataaatataatgcttccagttataatagagtttgagttttaccaaaggatgatagtttattttaaggcatctgtgtaagatctcaaatgttaaatgtaatcctgaatatgatcttagaaaaataaaatgacaatgagtttaggagtatgatattattaggtatttgtttctcaacacaaaaactactaaataacatcccctccaaatttgttaaaattgcaggaagactttagttatagaatcctccttctttcccagtctatacccacttttttctggaagttatccaaaagtgtgctcttgtttctttccagcaccattcccccagctcctgttttcttgtctttccatgtaatgtagacccagctgcttagggcagggaagatcatcagcaagactgtaaaacaggcaagcgttcttcaggaacactttctgggcccattgcctttgcccaggctgacagacagctctgtggtaatgagtagtctctgatcattacaaaaatagcagccatcattaatggagtgtctttttttttttctttttttgagacagagtctcactctgttacccaggctggagtgtagtggcatgatcgtggctcactgcaacctccacctcctaggttcaagtgatttttgtgcctcagcctcctgagtagttgggactacaggtgtgcaccactacacctggctaatttttgtattttagtagagatggagttttgctatgttggccagactggtctcgaacccctgacctcaagtgatccacccgccttgacctcccaaagtggtgggatttcaggcatgagccaccaacgcctggcacattaatgttgtttctcactgcatgtccaccattgtacatttactgttttgggaggatagtggtgaagtttcacataatatgaagcaggaaattcctggaggaattttgatttaaaaaaacaaaaagggctgagtacagtggctcacacctgtaatcccagtactttgggaggctgaggtggaaggattgcttgagctctggagtttgagaccagtctggccaacatagctacacccccaactctagaaattttttttttcttttttttgagaccttttcttgctctgtcgcccaggctggagtgcagtggcgccatctcggctcactgcaagctccgcctcctgggttcacgcaattctgccgcctcagcctcccgactagctgggactacaggcgcctgccgccacgcccggctaattttgtttttgtatttttagtagacacggggtttcgccgtgttagccaagatggtctcgatctcctgacttcgcgatctgccctcctcggcctcccaaagtgctgggattacacgcgtgagccactgcgcccggcctaaaaaaaatttaaaaaattagtcaagcacagtggtgcatgtgtatagtcccagctactcaggaggctgcagcaggaggatggtttgagctcaagagcttgaggcggcagttagccatgatgatgctgctgcacaccagccccagcggcagcaagaccccatgttaaaaaacaagcaacaacaacaacaacaaaattattctcctacttctgaaaggaatgagataacctttaagttaaggtgcagtttaagatgagtcattaaagactgaaacaacagaatcgaaacaaggaagacgaaaggagtttcagcctctggaatcaactatcttacatacttaggcaacaaatgtgatgccacaatcaggttttaggcaactgtagcaaaaatggtagcatttcagacaacacgtaaaagataatatttttaccattaccaatctgaaacaacttcacaaaaagtgttttagtactgttgagatgtttgaaagaacaagagtttggggagctatgaagtctccaccttaaaaacagcctcttaaaatgttctggactaaagctgaagggccataatgcagagatgtctttcagtgatcgttgaagtcatcacgttgaatgttgttcattgtatcatgtctgcaaggtgccagagaagagagaaacaggctttcctgtgtggtgtccaatcactgacaatggaggggtatggggagaagttaagaggaaacatgtttggcagaatgccagaggagctctttagtgcctgtttatggagtttctactgtgtgcatggggattgtccctgggaggaaaaggagaagaataggaggtgatttacatggactgcagtgatgacctaatgcttttttgaatattataccaatgaaaagattaatatgatgccaggaagtaagtgaccaagaagcagagaaagaagaggaggcacaagttcaaaagtctgtagaggccagagagaccagagaggggaataaagtgagccaggtggaactgtgagaaaccatccggtccatgatccatctaatgtggcaatcccttctcagcagcagattgtaggcccgatatctgttcattcaacaaacatttattgggtgccaacctatgtgctatgttctcttatggtcactggggataaattagtaaatcgaaaggacaaatatccctgccattgaattggcacttacctttttttcttaattaacaagtaaaaattggatatgtttatcatgtacaatgtattcttttaaaatatgtattcattgtggaatggcttaaattaactaatttaatagctaattaacgtaggcattacttctcatacttatgttttggttgtgagaacctttatctagtctctttgcaatttgcaagaatacaatacattgttattaactatagtaagcatgttttgcagctgagttcttgaactcattcttcctaactgaaattttgtaccttttgactaactttccctaaacccctcacctctatcctctggtaaccaccattctattctctacttctatgaattcaactttttaagattccacatataagtgagattgtgtgctgtttgtctttctgggcctggctgatttcacttaacataatatcctccaggttcatctatgttgctgcaaatgacaggagttctctttaaaaaaaaacaaaaatagagataggggtctcgctatgtgtcctaggctagtctggaactcctgaaccctggcctcaagtgtttctcccaccttggccttccctccagagtgcttggattacagttgtgagctaccatatctggctggattgccttctttttaaagattgaatagtattccattgtgtgtgtgtataacacagtggaatattatttagccataaaaaagaaggaagtattgataacatgttccaacatggataaaccttgaaaatgttttattaaatgaaggaaaccaaacacaaagaccacatattatgtggtttcatttaatattcagaataggcaaatccatagagacagaaagcagatgtggttttcgggggttggggagggaatgtgggcagtgattgcttgatgaatacagggtttccttttggagtgatgaaaatgttctggaactagatagtaatgttggttgtactacactgtgaatgtactaaatgtcatcaaattgcacacttaaaatggttaaaggccagttgcagtggctcatacctgtaaatccagcacttagggagggcgaagcagaaagactacttgagtccaggagtttgagaccagcctgggcaacatttgaaaccccgtctctataaaaaaagtacaaaaattagctagccgtggtggcatgcgcttgtagtctcagctacttgggagctgaggtgagaggatcactggagtcttggaggttgagggtgcagtgagccgtgattgcaccagctggattgcacttgagcctgggcaacagagcgagaccctgtctcaaagtaaataaataataaaatggtgaaaatggtgaatttcagttatgtgagttgtatttaaaaaataatggcatttagaaagactttcagaaatgtgtactttatgtcttggacatgagaaggtggtttagctagagtggagtctttgtaagggggagcggtggatgctaagggtgggaaaaggtttggctagatattgaaagatattgactggctaaggagtttagcagctataaatatagcaccatatactccatgaggaagaaggaaactcaagagaggttggtgctctgggaatcccagctaaagatgaagtttcaagcaaaggaagtgacttgtagttttatcagtccatgccgttgccactcacctaacagagttttgtgacaatctcacaaaagtttcaatattagtttagagtttcttcttcaaaaaaaaatctttataaaaggataatcatcttttaaaataatcatcctgaatataaaactatgttgataaaaaatctaaacattatataaatatatatgctaataaaaagttcctttaagtttaaagaattaaagcatctttaattctttaactccttgcttctcatatggtaaatctagagttatctagattgttttttgcatagacttatcatcatcatcatcatcatcatcatcaccactttttcacaaaaataggcacatgtgggccgggcacggtggctcacgcctgtaattccggcactttgggaggccgaggcgggaggatcacgaggtcaggagattgagactatcctggctaacatggtgaaaccccgtctctattaaaaatacaaaaaaattagccgagcttgggcctgtagtcccacctaccccggaggctgaggcaggagaatggcgtgaactcaggaggtggagcttgcagtgagccaagattgcgccactgcactccagcctgggcaacagagcaagactccgtctcaaaaaaaaaaaaaaaaaaaaaaaggcacatatgattcatagtattttttgcatgtttctttagaaaatgtttatcttggctgtcattgcacttctttcgtttggaccattacattatatgctattttatttgtaaaaacaaacaaaaagttgaaaagtaacggccacatacctctattagagaatgaattgttataaaatgtgaaagtagctaacacactgagcacttaatatgtgccaggcactattctgaacatattaatttattgactcttcataagctgatgaggtagatattattgttatcttccttttgcagaggagctaactgaggtacagatgaaaaaattatcctgccaacgtccagagttaggtggtggcagagatgggttccaggaccagcttcatctccaactcatgttcctatgaggaatgctgtggctggtggtgtcagattttacttaggattttttcaagataagtcaatctggaattttttgtgaaattttccaagttttaatgttggcttaaaaaatagctttattgagatgtaattcaaatgccataaatttacccctttaaactgtacatttaatggtttttagtgtattcacagtattgattgtataactgtttcttctatctaggtcaaaaacatttttagcacccacattggagaccccatcgcattcctaagcagtcactctccatcttctcttccttcagcctctggaaaccactaatctgctctctgtctgtatggatttgcctattctggctaattcacctaaatgaaatcaaataatatgtgacctatttgtcttctttcatttagcataatgtttttaagatttattcatgttggagcatgtatcagtgcttcattttatggctgaataatttttttttttttttttgagatggagtctcactctgttgcccaggctggagtgcagtggcacaatcttggctcaccacaagccccccccactcccccgccaggttcaagcgattctcctgcctcagcctcccaggcagctgggattataggcgtgcaccaccatgcccagctaatttttttgtgttttcaggagagatgggtttcactatcttggccaggctggtcttgaactcctgacctcgtgatttgcctggcttggcctcccaaagtgctgggattataggtgtgagccactgcacctggcaataatattctttgtagagatatatcacaatttgtttattcatttgttgatgtacatatgggttgtttccaccttttggcttttaggaattacactgctaatgaatattagtgctcaggtatctgagtctctgctttcagttcttttgagtgtatacctagaagtggaattgctggatcatatgctaattctgtgtttaaccttttaagtaactaccactgttttccacaatggctgcactgttttacattcctgccagcaatgtatgaggattccagttttttcatatccttgctaacactcttcattttctgttcttttgttgttgtttattacagccatcctagtgggtgagaggtggtatctctgatttagatttgcatttccctaatgactaatgatattgaccttctttttttgttgttgttgttaatttactgggctgcgttctttcttttctacattctagttcaagtcccttatcagataaatgatttgcaaaaatgtgtaggttctgtgggttttcattttcttgatggcatcctttgaagcacagaagtttaattttgatgaagttcaatttacccatttggctctgttttcattcttttttaatttaatttaatttaatttttttttgagacggagtcttattctgtcgccagactggagtgcagtggcacaatctgggctcactgcaacctctgactccctagttcaagagattctcctgcctcagccgcctgagtagctgggattacaggcacgtgccaccacgcccagctaattattgtatttacagtaaagacggggtttcaccatgttggccaggatggtctcgatctcctgacctcgtgatctgcctgcctcggcctcccaaagtgctgggattacaagtgtgagccaccgcacccggccttggctctgtttttaaaaagaaatacctggtaagtcagattccaacccactaattgcccgcttgtgattgctgctttgctgccactgccccagaaaccatttggaaaaatcctcatgctttttgaaaataccggttttctgaagagatggagcaagctctggaaggcaggaaaggcagatttctcaccaggagcaattttgttttggttccccttttctactcctgaagttccttcacttagaacaccttgatgtagacgtgggggcatagtaggaagtggacagaggatcaaggtctccaggtcttgaaaattttatgtttatcaaaagagaatattggttaaaataaaagattaaattggtgaaaataaatatttgtcttgagccatagatgatgtcatttaaaatcagaatggccataagagtgtggttagtaattgtgtgtttctaggaagaaaggtttatgaaccagtacacctagaagtcatctggggtaaggtcttaccctttatatttctttgaatgtgtacttgggaggagaggaggacaggtaactgtattcattcatagtcattcatacacattagtgaaaaatagttaaatctgcaggcctttacctctaccaagaaaaggagagctttactttggaggtggaaagggagtgcaagtttttgtggaacagtctgtcttttgagaagcagtacaaacccaggtaggctcctggatcacggtgcaaagacagaatgtgggaaagtcaagggtgtcatgtttgctggatctatagctttgcttagagctggaccttggctgaggaaaggaggaagaagcatttgtgttgttccttccctcttatactaacacacctgcattgttcgtcctaggtttcaccccaaaggcattttgctgaccaatttggagacatggttacaactcgtcttatggtttgtgggaaagtgggttccaggttctaaataacacccttatgttgggaatgcaaactgttgatctctgggagactaaatgtatgtctcattgtcaccttgatttcagagcatatactcttaactctgaatccatgaagtcctgtgatatagaggtggggatgagttcccatgtatgtgcttagtgagagggttcaggaaagagtttgttaaagaaatggaatttgtggaagaactttgattgaacagcaggatttctgccaagggagggaaactgttaaagatggagtgtcctatatgagcaaaggcttgggaactgggagttggatggggttggggtgggggcatgtttgaagttctgaatttgtcatttgggctagaccatagactacctgcaggaggcaactgaacagtgtagaagtggtggagctgaggcaagggcaaactgtagaggaccttgaatgctaggagagaagtttttatttattttatccgtcagtggggagcccctaaaaatgttagagcaatcactaacatggctaaagccataattcagcaagattggtctgatagtatagcgtacatagattagaattagggcttactatgtgacaagcatggtgctaatagtaatagctgacacagtgtgcttttttgcactgtaaatttcttaatgttcttcataaagtagttactcttgttttactcattttatagatgtagaaatatgcacagagaggctaagtgatttccccagagttacacagctcgtagtggtagaagtgggattcagcctgggcagataggccctagaacccacgctcttaatggctgagcccccaaaaatggtgatatttacagcattgtcagtacaaaggtacatgggaaattacgtttaacaatgtgtttaacctgcattttatggtagctgacgcagtacactagaactctatacagtcgacttccttttatagctgaatattggtccaacttttccattccttgtctttttttttttttttttttttgtaacagggtcttgttctgtcatccaggctggagtacagtggcacgatctcagttcactgcagcctcaatctcccaaacttaagcagtcctccccctcagcctcccgagtagctgggactatagacacatgcctgcatgcctggctgtattttttttttttttttcagtagagactatgcctcactgtgttgcccagactggtctccaacacctgagccttggtcccccaaagtgctgggattacaggcatcagaccatcacgcctggcctccattccttttctataacttgaaactttctatttgtaaaaaattcctcagccgaaagactttaaatcaacatttcaaatcaagttcgtcataaaattacaagccagttttaaatccctagaaacactgggcattactaattaccttttatattataatttattattaccttttatatgtgtattttcaaattttcttctcttttcaagcaatttgctattactggtgaatgtttctttgggagagttcatatgtacatgcaaacatatgattaagaaaacaatccaaaaatttaagggtttgagatgtttagcaaatgatgcattttactatagaatgagtatgtgtacaggttgagttttcaaaaagctatttatgtcttatcttttaagtcctcactcttgcaactttccttattattcctaattttgcacttgattgctatgaattccagccactaagctgatgaattcaatttactctttccactgttctccctctactggaatactgatattcatgacaagctgtaaggtacttcactagagggagcatagttaaggaaaggcatgccccttgtgcagaatacagccctggctctctctggagaagaacgaggaaaggggaaagatgtagtcagaggagtgagagaggatttgaacaaaggctcagccaattttaggaagataaaaagaaaccaaagccaacacattcctaatttagtggatctgagtttcttgttactcaaatgacttcagtcctttggggttgataatggagaatctctgttaccaaccctgtaatttacacagataagtatactgtagttaactgcttttcaagtttattaaaatgttgtactgggactggtggttttttccaattgaagacggttgtgtgggatcttgtatcttagaaatgttttgggtagttttagcctttttacattaaactggatttaatgtaggaaaggtcaactttttgttttgttttgtttttgtacattgtgatacctttggccttggaacaaaacattttatgagtgcaaagaatcctttttgtaaagagagacttgttagccttggcatctactgagaacatccctaaatttgggtgacgagataagaccacattttaaatatgtccttggaagggatgaaatgcacagaattagcagtacttcacctctgacagcccagttcttaagccatagacaatctagttggtggtgacagttttgatgaattgtttcccctacttactacttttctcacatactcagtgaaattactatcttgtgttcaccctggtgcctagtagagtgcctagtctgtagcaggcaatcaggaattgttggataaattgaatactcattattcaagccatataaaatgaattattacttaagttttcagacagtgaagttcctcagagttacaaggcatcatcagaaatgcactggcagaagcactgattgatattatacaggcataatactatattaaaataacatattaagtgaatgtaaattgtattggcctggtgtggtggctcatgcctataatcccaacacttttggaggccaaggcaggaggactgcttgggctcaggagtttgagaccagcctgggcaacatagtgagaccttgtcatctccacacacacatacacacaaaaaaaatttatacacagttatattctttttataatttggtggtatggaaaggggattatctaggtaagaggtcatcaagttctttactgtgggactgtaggtaatacagctaagtattgggtttctgttgtactcttgtttataaacagtatgctttgcataaggaatgcttttaaaagttgccaaaattcagatatcagatgcagtgtgtcagcttgctgttttgactttttttggtgactcattccaactttaaggaaacttctaacgactatggatatcagaacatttctaggagttaggacttttttatgggtgaagaaagagtgggtaaaatgcattggctgcagcaaaagagaactggttgaagaaataccaggaaatgcccgtcaatctcttgtctgcacatcctcttcagtttgatagtaagtttcctaagggattgagctgaattgctcagtttaatataagacacttatttatagtgcttatttatgagattcctcaataattgatagcttgctattagttttgagtattgaggtactcaataattggtaactgctatttgtaataatttcccttaataacgatcataatgccaagaggatacttaatatttttcattttaagcccgcttgtgttttattaaaccaatcaaaaactttgaagaaaaaaagaggtatcaagcaggaattgggaaagaagttgaagtactctaaattgctgcattgatccccattggctagaagtcatattagtgaatcttgaagtagtttcacatccaaaagaggaaagtcaagcaatgtcttgaggaagtaggaccatacttcatgtttgccattctccttatttttgttctcactctgtagtttcagggatctgaagagctgtactcaacaagcaagctccctttgttatctatatggcttggtggccgcaagcttttcttttcaatggtagcttcaaatgccgttaaaatccaaattttcgtttttcttaagtgtagaatttcacaattccaagtaataaattgtgtactttaggaaaacagaggttgggtgttttcatgtaattattcagattttgcagtgatttggaatgaatgaaaaattgaaaatctgcataggggtcatctaagctatgttaaaagttagaagggaactctattcctgtcaagggaattatatgttttactcctgtgcatttttctcattgatagtcttatggaggaagttaaagctgtagaaatgatttttaaaattaaatctttccaatcatttctactattttggttattttgataaggacaggaagtaaccatggtttcactttttggacttgtttgcacgcaatccaggaaaaaattttacagacttatttctaaatctttctaaaataaaaatgtgtgtgtgtgtgtgtatgtgtaagtatgtgtgtgtgtgtgcgcttttaaattttgaaccccaaaccctctctagcaatcccaccttatgtttgggttgcagtgacatttctttattaatttttatgcttatgtaaacttcctgtgtttctgcaagttggaccaacaaagaagttggctacctctgtcacatcagatgtttgaggtacaaaaaaaaaaagaattccacttcctccccatctagtcagagaaagcacttgtgagcaagcatctctgacacacattacaggagttgatactactgcagtgtgaaacatgcgtgaaacatgctgataagaatcactgtttttgtctcaggcttcaaattttcacatcaatttgagaaaatagtaatatcaacaattattgaaagtggtgtggtctgctactgtttcaagtatttttaatgctttaggtcattaagtagccttttattttgccatctgtagcctatcgctaagcaaatgttgtgtatgttggggaggggtgctaagttttgcgggccaatgcttaatttagtgaacaaaatttgaccgaaaacagtattttctaaacatgttttgtaggaattccttatattctcctaatccctagggtctcgtcctgcccaagaaaagacaaccataaagagggaaggactaacaactcaagttaaaaatgaatcagatttttacttttggggtgaatgaatcacttccagaaacttggggtggtgcctctaaaatatgtacacgggttaaagcttctctcggtttgtttcactctcctccattccctcgcacactgatctcatgttctctctttgctggacgaattcaagttccccaggcgcacagtgtgacttccaattgcgggtcgggggcacacatgtgggcggcgtggcgtgcacacggtacttcgtcctgacacctgggcagacacctgggaggcacttccccgctagcccaaggttccctgcacgcccggagtccgctctgcggcggcttcccattcatgcttttgacaactctgcggccgcccgcaagccgagggcaaagtgccccctgcaccagcctctcccgcgctgccctggggccggccggccggctcctccataggtggctgcatttccgacttcgccctggctccagtccgggggcttgacgtgcaaacttcgccggagcgagctgagagggagggaccggcaagtgggaggaggcggcgggaggcgtctccgcttaagggagccggccgggtgccgccgctcggacggacgcgcggacggaaggaaggagcggggcagccgggccgggcccggggatgcaagcggccgaagggtgggcagctggaggtcctggggtgcggctcgggcttccccgcgcgggctgccatggtggggcgcggggttggagccgggccgctccggcgctggcctccgcgccaggtcctctgagcagaagcaggcaggggacccagcgccgcggtggcgggccgcctgctgcccgtcccctccctcgggcggccgcgggagtcgaaagcgaaagctagcccgcgccgcggactttgagcccggggcggggggtggccttgaggaggcgggctcggggggctgggcggccatgggggcgctgtcagcgtgccccacccggtccgcgggccgcgcacgccgccggaactccctggcgcctccttaaaaaacggcccccgcgcgactctttcccccttttttttgttacattgtaggagcggaaagaatgtcggagcgggccgcggatgacgtcaggggggagccgcgccgcgcggcggcggcggcgggcggagcagcggccgcggccgcccggcagcagcagcagcagcagcagcagcagcagccgccgcctccgcagccccagcggcagcagcacccgccaccgccgccacggcgcacacggccggaggacggcgggcccggcgccgcctccacctcggccgccgcaatggcgacggtcggggagcgcaggcctctgcccagtcctgaagtgatgctgggacagtcgtggaatctgtgggttgaggcttccaaacttcctgggaaggacggtgagtgtccacgccctcctccccccttcaccccctcgcgaccccctcctctctcctcccctcccccctgcccccctcctgtgacccgccccctcgaggggcagagatgctatcgtttgctgggttgcggaacgcggaggtgcccacacctaccccgtgcgtgcgtgagtgtgcgtcacactcctggccactgacctgcctctcccctcctcctgtgtgtgtatatctcctagggacagaattggacgaaagtttcaaggagtttgggaaaaaccgcgaagtcatggggctctgtcgggaaggtgagtccagcccccctgatggagtttgtacaaacccctgggaagtttcattgacagttcactgggaccgggaacatcagcccaccataccgactccccgactccccgtgcctgcgaagatgctgcctgaggagggagggagggggcagagcgcttggaaagtttggtttgggggcctcctgtaatgagagcgtccggaatccttctgtgaccaggcaggagcagcattattggtgatgagcgctgggaaccggcgggaagtttaacctagatctctgcatttctgacctccttacggagaaacaggagtagaggaaggaattctcagctttgaaacctttccacgaatgcttaggggacattttctgttggcaatcgaaacgaattttgaacttaaagaagatgctttacctatgcagtcttatttctgtaggatttaaggtacaagttggggatgttagaaaaaggtcatcataacccggagtgcattttggtcagattttttgcgagctgccaatatcacgggggaaagaaagccagaattttatttggtcaaataagcctttactgcccgtggctggtgaaatcagggtctaattatttgttagttttaaactgtttggtaaaaagatacactagggaaatagggtatgcctccaaatgaaagtcaggccaggtatctggaaagtgtcagactttttcttgagattttctttttctttgaatagtaagcttttgttgtctaatacctgcactaggcctgggcataccgtggtcagaaaggacttctgaagtccagtgaacttcgggttcagtttcaagttattctttcagtgagttaggacaaggctttgagtgaggtttggccccggaatactgagtttatagtccccgaatgcaattttatttctcactcgtagccatttattttgcagaattgttgtctatggcccaaggataggtagaactttggcaactggaacatttttaagtccaaagtttgcccattgttactgtcttcacatttccttctcgcttttcacacctgctttttcttcacttaactctgtttcggtttttttgaattgggcgctttttggcctcttggcactcggaggaagagtaataccagtgacagcccgatgagagcttccaattggaacagattatagaacaaattagttgatttttaaaatgagaattgctatttgagggtaaaggaaagcaagggaaagcacaggacttgttgatgatgttgcaatatgaaaaatcagttgctagtccggttttagtgctgaattggcagcctgcctgggcttaaaaaattaaaatcactaggtggcaactctcacagtaagcagttagagtagaactttagaggacctgacctactcttgttcttagttttcattctctgggtgtggatacatatcctataaaacgtttctaaatctgtgtgaaaacaagattgtaattatcaataattctgctgtaaaggatgagttaagtgtattaatgtttcagtgggtaccttgagctggacagggacccaaccaaattaaggggactgtacctcatttttgctagatatattattttctgttgggatacttttatcagcatgtttttcatgaagaactaagacgttaaactacctacttgaggcacaaaagggacatggatcttgttagtgttttgttttgttttttgagacggagtctcactctgtggccatgctggagtgcagtggtgcgatcttggctcagtgcaacctccacctcctcagtgcaacctccacctcccaggttcaagcgattctcctgcctcagcctcccgagtagctgggactgcaggcggcgggccaccacacccagctaattttttgtgttttagtagagaggaggtttcaccacgttggccacgatggtctcaatctcctaacctcgtgacccacctgcctcggcctcccaaagtgctgggattacaggtgtgagccaccgcctggcccttgttagtgttttttaagggttcccctcctcccccttttaaagttgttctaaccatttagaggatgctgtagctaccaggccacttggaacgtacacctgtctgagttgagaccgaagttttaaattcagtcagttcttcatttgtttgtgactttgcggattatgtggggatattttaaaatccaagtttgaggatgttcagcactcactcagtggacctttatgttctcctaacagaccattgtaggctgcttcagaaatgaaaatacatttaatattatcaaaacttattagactattattcattcattgtctgcttaaaattatcagctaccaagaaaagatgttttgaagttgaatccatactgattcctcttgttaaattgaagaaatatgtagataaattgatcatgtgagtgaatcactggaagtcagaaatgaccctttatttatttttttttttttttgagacggtgtctgactgttacccaggctggagtgcagtggcaagttctcggctcactgcaacctctgcttcctgggttcaagcgattctctggactcatcctcccttgtagctgggattacaggcacgcaccaccacacctggctaatttttgtattttttatagagatggagtttcattcaccatgttagtcagtctggtctgaagctcctgacctcaggtgatccacccgcctcagcctccacgaagtgctgggattacaggcatgaaccaccacccccgccagaaactcctcatcttgaaatatctctaggaatatgcacttgacttgaattctccaatgtgcaattttggacctaggggttagaaagcctggatgtgagagaaagctgcttaaccttgcattagttatttcatctttctgaatatactttccctctttggaagataatactacctacttcccaaggttattgtaggagctgaaattaaattagataatatgtgaatgactcagtacacactaattccttttaactctttcaactgttgataacctgacttcttaattctatatttctaggtacagggttttaaaatctgtgacctttgaaaaggcttcaggggattgtagttcccctgaaattgtatgcaaaataatatgtcagttttctagggtaggtgttcacagcttcccttggattctcaaaaggatcatttacacgtccccacccctaaaattcaaaactgctaagctaacctctctgcctgttttttcttttcactttttcctcttgtaacacattactttgaccaactcctatcaggcaagactacccaagggttaatgctgtggcagaaggttggaactcttgatttagatggagggaaattatttgtggtttaggtagtaaacctacccaaggcaagaatacccaagggttaatgttgtggcagaaggttagaactcttgatttagatggagggaaattatttgtggtttaggtagtatatcattccctcttctgccatttggcacaagtaggcaaatgttaagacaaaatttggttatttttcagaggtcaacctagttttgtttgcattcttgtatttgtattgccttattcttgttctgtaatttgcaatattagttgttagcatgattaattttggtgggaagaaattggtaatacattttgactttttgttgttgttgttgttattgttgttgagatggagtctcgctgtgtcgcccaggctggagtgcaatggtacaggcacgatctgtgctcactgcaacttccgcttcctgggttcaagcgattctcctacctcagcctcccaagtagctgggattacaggcacctgccaccacgcctggctactttttgtatttttagtagagacggggtttcaccatgttggccagcctggtctcgaactcctgaccagaagtgatccacccacctcggcctcccaaagtgttgggatgacaggtatgagccactgcacctggttgacgtttttgaaatgattaaacgtcaaccctggttgatgtttttgaaatgattaaacgtttttgaaatgattaagacaaattactgctttttcccccaaggtgatttgtgaaattccggacttccacagattttggatttgtgaaagttaacaaaattatgtttagattgaattaattggtactaataactgattagggtttctatattagtgcctgaatatttagagacccttaaaaaataaaaactttaaatgccttagttgcacagcagattttaaaacctatattgtgtcattgtaggagtcaacaatggtattgggaaaaatgacatcttctttgggaagctgtccataacttctctaagtctaaccgttgtgtggtatcaaagtactctgtactttttctttctgcattctacgtgtcagcatttgaaactctgcattatgtgatggctccttgttaagagagtaagttccctgagggcaggagtgttgttgatgaaggcatattcagctcctgcacaccattgtgctcagtaaatatttgccccaaaagtggatgagtagagctactaggaagattgaattgagtcactctagtgtgtgattcaaatgaccaatttttcattgtattgtgactccaaaagaagacagtattctgtgtgtttgtgtgtttagggggtgttgctgtatggccccaggggaggccagaaggtttcagcacttttcgttgctctgtccttaatatagtgctccatttacactttccagaaagggtacagacaggacatcacctctcttatctttgatatttaggcaaagaagtagaatagcaacccagtgtgatgtccacacttgatgacaggttatttccttctcataattaacctgaacgtgattgagcctggggcaagatggaaaagtgtgtggttagcacctgtaggcaactagagttcaaaacaaacaaacaaacaaacaaacaaaacaggcttgctaggagttggatagcctcagtaaacacagactgagtcaacagagtaccaccttttttctttcctaggggaaaaaaatggttcatggttaattaatggaaaacaggtgtttgtgaagtattttactgttaaaggtactacattgtgggtataatatcctctcccttaaatagcatttctgtttttctctagggtttcttttgtcttcttttctcctcaactgtttcttatgaacaatttgaaacatacaaagtagagaaaatattttaatgatcctccttgtatccatcacacagtttcagcaaataatgagtcatggcccagtcttgcttcacaaactctgccctactccccacagtgaattattttgaagcatatcatttcttttggtttttattttctgctcacatggacttcaacttatttcctgcaaaatggaggctttttgtgttctgcacctttcttttgaggcaagtcaggctaccatccctgatcctctctgtgggtgtgtaaaggttctgcagatggcagtacttgcagtctgcttatatcttatgtgcagatataaaccaagcctcagacaggaatcggtaaaatccaagttccctgcctcagcatcacctcgtgcttgttgaacattaatgcacatgtaaggagcagtcaggtgatttggttacagatcgcccacacttaagaaacacctccatagatgagaatcagcgtggccgtgacagtgggcattgtccttgctgacagctcctgtgcgtgtctccttccttgtaagctcttcactaacgcgtaggtgcaggaacccccagagacccagaaagaccctcctgtagcagggacttttccccagttgcagcgtgtgggccaaatcttgcctgcatggtttttgcattgcattggttggaataaaaactcaaaagatttcatgacatgtgaaaattatatgagacttcagtgtcagtgtccataactaaattttattgaaacgtagtgacgggcattcatttacttgtctgtggctgcttgctgcatacagtgaacagcagagttgactacacacaacagagaccatatgacccaccaatcccaaaacacttactattggttctttacaggaaaagtttgctgaccactgttctgatgaattccttggttgataaaaggaaacccaatctgcagaatcgcagaatacagtcttattattcttgaactgtctattttgaaggggagaatcttcaaaataataaaatccgttagtcttaaaccaagagttcattcaatattaaagaaacatgttgagttagaaggaaataatggagagtagaaatggtttcacataagaaggttgctgtctttgtccacttttatcattcactatctttttttttaattattatactttaagttttagggtacatgtgcacaatgtgcaggtttgttacatatgtatacatgcgccatgttggtgtgctgcacccattaactcgtcatttagcattaggtatatctcctaatgctatccctcccccctccccccaccccacaacagtcccaggtgtgtgacttttttatggcatacacctggttgggagcagttcacatacagagcacgaatagcgctgttattgccccagcttccaagagccatggaccatgagaatggtgcttgtgttctgttaagcccctcatggtatgtaaatatgcaagagaaagagtccagaactttcatggaatttccattcaaattctccagaatcgctgcccctgagctggtttagagaagctgaagccttgttacaggtcttaggagttataggaagaattcacggggaaacaaatctgcattttgattggagaagaaggcagacgttgttctttaggccccatatctttataattttgtgcttactggaaagtaacacctggcacaatccatgctgaatttctgaaccctcatgtttcgcaattcatggagaccatgcacatgtttccatgtgcacagtaggatggggttcccaagctgtgtccaatttacagttttgattggttcttgtaaactctaatctcaggagggaagtatgaggtatttataaatcacagtcctgtgatctaggtatcaccattatctccattttacagatgaggaaactacgactcagaaaagtgaggtagcccgctaagatcacaaagcatgtaagaggccctgtaacccagatctgtctaattactccacagctcacatgcttaaccattctgctgttccgagccctttccagaatgtacatggcttttcatgagcttgagcaggtcaccctaacctttgtttttcttatccttgtctagaaatactgacctttaccaaaagccattttttttaagtaaaaatatcagagccttttcttgctgtgccttacaacagtcggtgtgttgtatttagttgttcttttataacattttttctttgagggggaggggaagtatctacagtttgcattagaagtaatgggctttttaaaaaaagattaaatgaaagctaaggttgcagcagatagcaaacacaatcatctgggatttgtgccattaaaaaaaattcctttagaaagggagaagtgaaatttcactatttaaatagcatttcagtgcaagattgcttttaatcacattgttgttgaaagtttttattgcagtatttctaataaatgtgcccctctgattattaaagtattttttgattgaagttctaagaaaaagaagcctgttagtagacttagcagttggagttactgtacttttgagaaaaaggcagagggttacatttatattcatcttgtacagcagggattataataaatgagcagaagaaggagaacgatttttgcatttcacccactcataacgtaaaactagattaagtattcttgttcttctttgtaataaagaccctgctagcatgaaatgtttttttctcttatatgtaagcatatggcaaggaaaaagcactagttcattatcaattagattcacaatcttaaaacagaaactatttccctcccaggttatacagatgttttccataatcctgaactccagtcatgcaacagaaaaaaaggtaatgcttttaaccagtggtccccaggctttatatttcaaacaagaaagtttcagaaataatttggggactccagacatacggttgttggcaatttatatgtacttcccctcaaaaaagtatgagaacattgttttggaataaaggacagtcctttaattgtgaaaaagcactgtggtcttcgcagagaagagtatctattttggtgtttgagtaccatagctttaaatcattatttccaaaagcgtgttccagggaaccctgtttctgtgtgctcttggttggtgttatgcagaaaagaggttccatatggcaagtttgcagaagttagctttacacagagacagttctgggaaccccagttctagaattaagcctgggctcaaatctaagatctagtaggtgagcaatttgaaggaaaccgcatagctttactgagcctcacttgactcaggtataaaatgagaataatgctagtaactaataggggttgggagaattaaatgatataatgcaggttatcagtaatgaaagcacagtgtcacaagcacgcctttaatcaagtcatcagccaggactgtcagaggagcagcagaaagtgaaatgccagttttgctttagcacacaaggtgtaggcagtgagaggaaactctggcatgacagagtgtagcaaatgaaccgcagtttttttctttttctttttttttcttttttattcttttgaaacagggtcttgctgtattgcccaggctatagtgcagtggcatgatccatggctcactgcaggcttgacttcacttcctggtctcaagcaatcctcccatctcagcctcctgagtagctggggccacaggtgcacactaccatgcccggctaatttttgtattttgtttgtagagacggggtttcaccatgttgcccaggctggtctcaaactctggagctcaagaaatcctcccacctcagcctcccggagtgttggaattataggcatgagcaatcatgcccaaacctcagtttcatgccttcttggactctagtaaaaatgggaagtgggaggtgacatttcttagttcctcctttagccacctctttgacttgcagagagaagcatgatgtgggtatttactttttcctgcttatgcagagttgtacttgctcatcttctggaagcctgtagtttgtgcttctttatgctgctgcttgtaatgtttttcaaacccccttttttctgggcaaaaaaggtaaattataggcaatgtaataaagtcatcatgaaggtggggagtggatcagaaagataaatgaggatcctacttacatgatttttttaatgtgtggtgatagtcatgggggttttctgcctgtagagggaatttagaaaattgccttttcagttcttggaaatttccaatttaacttagcagttcttcacttaaattaccttgttctttttggaaactatataggaagattggttttaatggaaaaaattattacagaagttaatacatgctcactgtaaagattttactaataatagaagtatggaacacagaagccatcattctgtgtaatcccactctgggccaattttgtattttcagttacaggatttggacttagggcaaatcacactcgatcaaggacacctatgtaactactttgggcagttactggtaagcaaaactgaaacttgccaacctggtcatttcactttctgaccagtttcagaccgtgtcctttagtaggcctcagtgtattttgtttattttgtgattactgccttgagaatcctctgactgttttgccttaacttcactcatttagcttttatcccatgttctctgggcctcatgctaggctagataaagtctgaggatacaactccacagaaggtgagaaagcacagtcctaactcccaagtcaggcagttggtcagcagatacttaagtgccaggttttctgatgggtgttagggatagagtgacacaaatcagatggagccccagccctctagggaagtgagatacagtaaatacacaaatatttccaaggactgttgaatgctgtgaagtcaaaagtagggtaatgagttggggttagggggattctaactaacatgatcaaggaagacttttctaagcatttaacatttgagctgagaccagaatgccgagaaagaagtagccacaggctgggcgtggtggctcacacttgtaatcctagcactttgggagactgaggcgggaggatcacttgagtttaggagtttgagaccagcttggcaacatagtgagaccccatctctacaaaaaaaattagctggtcatggtgacctgtaatcccagctactcaggaggctgaggtgggaggatcacttgtgcccaggaggtcgaggctgcagtgagctgtgattgcgcatactggactccagcctgggcaacagagcaagaccctgtcacaaaaagtaaaaaagaaagaagcagccatcagatcatctggaaggggcactctgagaagggaagggggaggaatgtagggaaataatgctgacaaggttagactgtagaggccaaggaaaggaatttggatttaagtgtaatgaaagttggggggatagttggtggttaggggtagcttcagcaagggaatgatctaattcatgttaagatcactggctaatatgtggagggactggctgaccaggttagaggtaatagtggcttggactttgctaatggcagtggtaatgcagagaggttatcctgttcaggatacgtttggaggtggagtttacatgatttgatgaaaaattggatgtggatgagggagaaatataagaattgggatttggggcttgagcaactgaatggtaccacttaatgaactgaggaatgctggcgaatgtgggagacttagggtcagcagctctgattttggccacactgcttttgacgtacttagtgggcattcatgtgcggctgtggtgtcagcagttgaatacacaatctggagcatggtggagcagtctggggtggagactgggtcagtctgtatcctcaacatacagaggacatggaaagtcgtgggacctaggtttgtttcctaatataggagtgtcaataaagaatccattagggccaagggctgagccttgggtccctccacagtgaggtggtgggtgggcgaggaggactcttcagtgaggcagtaaggaaaccagatgagtgtgatggtggtgaatctgggaagagagaagaacatgctttaagtgaggagtgatggtctctgttatatgctgctgtgaagtaaagtcaggccagagaatcgatctctggctttgacagtatgaaggtcattaatgaccttaatctggagagttggggaggcagaaccctcattgtatggggaagtgatagcctgagctgaagaagtggagagggcaagtatggacagctttttaaagggtttcactttgaaaggggattggagaaatgaggcagtagcaggatgaagacatggggtaaaggatctaagggaatgatgaggaggtttgttttattttatttggatagtattagggaatgtttgtctgccactgggaatgatccaagagtaagggataattggtcacatgtgaaaagaattgataatcacaagtatagtaccttgagttggaaaaaggagatgcaactcagagtccacatggacaggctggttttggatggaatcagagactttatcacattctcatgagaggaaaagcatatggattcagttgcaggtagggatgtagaattgtggaataagatggttagttcattctcgtcatttctgtgaaggaagagggaagttgggagatcatctgttcacagtaagaggaagagttttgtcttcctttttaagtatccagtcaaggatacagggatacagccaagtaacaacagacatttatgcatcctttgtagtagggatccccaacttctcggctgtggatcagtacccgcctatggcctgttaggaaacaggccacacagcaggaggtaagtgggggtgggggactgagcattactgcctgagctccacgtcctgtcagatcaatggcattagattctcataggagcacaaactctgttgtgaactgtccatgcctgggatctaggttgcgtgctcattatgagaatctaatgcctgatgatctgaggttcccctgacccccccaaccctggtcagtggaaaaattgtcttccacgaaactggtctctggtgtcataaagattggggactgctgcttcagaggcttcccagcacccttagaagaaaatgtaaactccctagcaaggcctggatagtgggagtgtgtgcccagaaaatcagaaatctcagcaacttgaggtggaatcctgtcagagcactggggtgaagaagtagagatcaggaaaggaaggcttcctggaagaggcgaatggggagagttggagagttagccagtctggtgtggaagcagcttgtgaggctggggcatcagtgtgtgggagcctggaacttgttgcagccttggcaggtaggtagtggaggacaggagatgggagtagatatgtttgaaagatcactatggtagcattgtagaaatgaattggtggtagctaaagttaagggccagttgggcatgtagccacctccctaatgtgaaatccccaagtttctaggtaatgataaatggaggaagtggaattttaaaatgtacttatacaatcaaatgaatcaaaatgaattgtttctccccggtaaaaccctttaatggtttctatttgcttgcctttgttcgttcatacaacacatatttattgagcatctactttgtgctaggtattttcaggaaaacaacagcaaagaactgccctctaaaggtttattttagtggaggagacaggcaacaacaacgagttaaagaaaagtatatggcaggtggtaaggggtgttttggaaaaagatgaagtatgggaaatacaattttaaatggggtgagaagggattttctgagtcgtgacttgtaggatgtgagagcttcagtcgtgcatattgtggataagctttcacacagaaggaacagcaaatctgaagtctctggttggagaagacctggtgttttgaagaacagcagggggcggagtggctggagaggccagtgtggagagaatgctgtggaaaaaggtcaggtgctgaagggttatgagtgagttgggcaggcagatcacacagggccttgtagcccactgaaaatccaaatcctttactgttgcctacaggctccacttgggctttttcccactcctcagttcttgcatatgctcttcccactgacgggctactgcttctcctgctgccccacacctcttccctgatggtttcttctaaacctgctagacttaggttaagtgtcaccgttttttttaatttgtcctaatgctctccctccccttgccccccaatgcccaacaggctccagtgtgtcatgttcccctccctgtgtccatgtgttctcattgttcaactcctacttatgggtgagaacatgcggtgtttggttttctgttcctgtgttagttggctaagactgatggcttccaccttcatccatgtccctgcaaaggacgtgaactcattctttttatggctgcatagtattccatggtgtgtatgtgccgcattttctttatgcagtctatcattcatgggcatttgggttggttccaagtgttgctattgtaaatagtgttacagtaaacatacgtgtacgtgtgcctttatagtagaatgatttataatactttgggtatatacctagtaatgggactgctgggtcaaatgtatttctggtaggagtcacctttttgaattttccacatcactctctatattgctttatagccattatcaaaagatatccattgctgtctggtgtcaacataaaccaagccatcactcttgctgaaaggtgctgttattgttagatttggggtataaatgccaggtagaaggaattatcatgagaagtgtttacataggtcttggctaatttgcacaattggcccggagggggaaaacagtatagaccacccactaataataattcttgttgaaggagggagataacattcacggcataacactcccctgttggtgatagagtgtggttcgtctttggttccagtgtcctggtattcttttttgattgagtaacaataagccgtgaagagagaaatggttttggaatagctggtatatacaaataaatgacggtgtgcttgaatccctctgttacatcaccagggttttctttcccaagataaactctgtgcttttttccagcctctgaataggatatttattttctcccttccctttatttctgtttctaggcctttttctttccactctgatgaactactgtactggagacagactcggtgtctgctgtagattttaaatgctacactttctgttcctcttatcttagccccatgtctggtgagcttttcattgttaactggcagctgcgatggctatttcttcaaaagatgttgttgtttggtagatgttttcttaaaagctggtggctgttgctgaaaataatctgtgttgtgtgagtttataatctattcatgaatcatattctcattgtggttgtagttacgctagggtaacaaatacaacaattaatttttttattcatcagtgctgggtagtctttgtagaaatttcacaaagatcctctttttttcttcactagtaattctgaagtaaaaatagctactgaaggctgagcgcagtggctcacgcctgtaatcctagcattttgggaggctgatctgggagaatcacttgagcccaggaggttgaggctgcattgagctgtcttcatgccactgcattccagcctgggtgacagagcgagaccctttctcaaaaacaaacaaaaaaacagctacttatatataggatttagatagatggcaatcaagaattatgaacatgtgacaaatccttatagctatgtggttgcatacccatttttttttttgagtgccaaggtatttttgaaaagtaattgataacttaaaaaattaagcatcttagacaatacctggtagaaagtagtggtagtaataatagtagctctcattctttgagcacttactgtgtgtgtcacgcactgagtaaagagctttacatggactgcctcaatccttacagcagtagtctgaaacaggtatttatattatccccgttttaaagaggaaactgaggctcaggaaagttacactgtcccaaatctcactgcttatgagtggcaaagctgcgattcctggtctggctcaccccatggccagatggttccctgatttatcaattcagcagtggcttatttctgcatgttgagctgacatttgtggggacaacaggaataggcttttatttattggtaaatgagtaaagcatcaggcgcactccagagagcagtttaaaatcagggaatttgcttggttaatgttttagataatagcagcagtagtgaagttctggtggagagggggaaatggattatgtcaggaccttgggcctaaaacctttgcgaggcttgagtgtgcatattagtccacataagggttcatctaaactctgtagggtatatagtttgtagaatgcatggtggagaaatggttaactctgagaaagcaaatcctaatggttagttgagacaggtgaaaacaattcagaaattaaacataaaagggaaatggcgtatttattacccacttaggacaatgtctacatctgagaagataaacacaactattacaacattttagaataatgcatggaaatcattgtaatccaaagattatctaggaagctttctctctctctctctcttttttttttttttttttgtttgagatggagtctcgctctgttgccaggctggagtgcagtggcgccatctcggctcactgcaacctccgactccctgtttcaagctattctcctgtctcagcctcccaggtagctgggattacaggcatgcgccaccatgcccagctaatttttgtatttttagtagagaccgggtttcaccatgttggccacgatggtctcgatctcctgacctcgtgatgcgcctgcctctgcttcccaaagtgctgggattacaggcgtgagccactgcgcccggcctgcctttcttttgagaattagaattgttaatttttactcgtacccattaagcaaggctctggttgatattaagtaactaagtagattgatctgacctctcattcttttttccccatctctgcttgcccgggtggtaatgctacccagaaaggaaataagttcaaacaacaacaaaggacagaacttttcatcagatattttctttagacttggtcatgttacattactgtggccttacctgtgtgtgtcagggcgggcacaaggccgatgggagtttgctcaaagaccaggccagcttgctctctctgaccgcagagcctgtcccagaaccctgtccttggctcatcacacagtggttcacactgtatattgccagtgagctgactgacaagtagtggagagatgactgagaggctccccgatccatccacaggaactgggaattacctgcccagtagtctttggcaggaatctagggttttgaaatggttatgactaaataggacataatttttttaacatgaaaaatgggtcttaatatatattttaatggttctgaaatagtgccgaggactttgagaggtcaggctttaatgcttgatttggtaaaatttaccagcccctgttcagagacagattttccttgcattttaaaagataagtttttatttttattcccaaatccccaggaaattttaagtgctgtcagttttgtgaaaaggtaactagagagtgagtagggaatataccttgcaagctattggtttggcctcattactcaaattcttatttgcctgatgaagatatcctgtaataggatccctttgtgtgtagcccctccacagctttccctggaaggccttggccatgattctgtctatatctgggcactgtcaaatgaagagagaagtccagagtggaagaatagccacttgatctttttcaaatcccagagtttacaattttttttttttttttgaagatggagtctcgctctgttgcccaggctggagtgcagtggcgcaatcttggctcactgcaagctccgcctcccgggttcaccccattctgccttagccccctgagtagctgggactacaggcgcccacgaccacgcccggctaattttttttgtatttttattagagacggggtttctccgtgttagccaggatggtctcaatctcctgacctcatgatccgcccgccttggcctctcaaagtgctgggattacaggcatgagccaccgcacccggcaagtttacaaaatttttaatggattcgaatgtatctgtactgcttaagaatttttgcaccaagttttaggacactagacaggtggctacttctgtgaagatacaataagaacttgcgcattgattttgttaaatatggctgttgattgccgtatgtggcttgggagagtagaatgatgctgtttcaaagaactgctaagaaaaggtgagacacaaggatctagaagaggtggacccttaacgctggagttaatggtatatacagtagaagttttgtttgtttgtttgtttgtttgagagaaggtctcactgtgttgcccaggctgatcttgaactcctgggctcaagcattcctcctgcctcggtgtcccaaagtgctgggattataggcgtgagccaccacatccagcctacagcagaagtttgctgatttattgtttctagtgctgatcttcttgctgttactaacttgtaaacacccgcccccccaaaaaaaagtagaggagaaagcatgaagcttaattaccccaagttgtattataactctgataaaggttttgtaggcaatagctgtgaatacccatgtgtggaatctatgcttatagtgtgtctggccttgactaggttgtcaggggctcagggagagcccctggaggccatagaggacacttcgggactttctcttgctacagagagcaaactgaaggcccctggctaatgaggccgctacaggtctgatccagtgttctcttttccttatggcctttttgtcttctcttcagagaaaaggaacattattgccatctatttttttattttttcaaatacccttgactgtatttattctgtattaggtgatctcctttgtctccacccataccctctttaaattgccccactgcccctgaaacttttactttaggaaaagagtttacattaaatgctgctctcttttagtgtctcccttgtcatttaggtgacatgggtggcagatgtaagttttaacgataataaaactgtgtcaaaggaaagagaagcctgaagtttggaagtagacacaggaaggacgagggtgtgggctttgaaatcagggattctcaaactggggttatttgagcaatgggaggtccttgcatcacttcatgtatatgtgcaaaatattggccatatttacctgagtacagttttgtagggagagaaaatataccttccaacagattttcaaaagccctcatgactcaatagtgtttagcaccaccaatgaatatccaaagtgtttttttataagatcatcacaaatttccattattattttacttgtacttaaagcaggtgtttgtgcaggttcccatattcaaggtaattaaaaaattttttaatttggtttctaaatgttttgttttgcttagtgcattcactgctgtgttttctgcaatattaattacagaaacatacagtattttggctgcattaaaagttaagagtcagaagtaggccaggctgagaagatgaacctttttttgtcatagtaataccacataggcatgcatcatttcagatagacaaaaaaatttcagtcctacctgaggttttggaactgaagttatttgtaaattaagggcaaatgggagacagactttaggacttgaggtggcagccagggtgatctttctaatactctcatataatagggtcttgtttttaaatgacttcattgattgccattgcccttagggtaaaggtaaaactacttaatgtggctggtggacagtgttgtatttgcctaaggccaccacagcctctaaactccttggctttttcacaggttatgtgctgtccctgtgtaggtacactttcctttttcccagacaatttccctctgctcctttcccgtgacccctttccccaagaaagagaaaattacttctcatctcttagatcggggcttaggcagtagttcttccaggcagcttccccaggcctctggtccagttttatgtctgctccttgctttttgtgttcagccatagggagattgttacatgtcatcacagatagatctgtctaattttattcaactaccacctagtttttggtattatgggtgtgctattcttgtttaaacttgacctttatggatggacatacagactcttggcagtgttgctgcttttaccgacagtcctacagttatttttacaagtttatttgcagtagtgatgcttttgtttgcttgttttgtaagtaaactcagacaacttaagagtgtatctaaagaggtaatgtcaaagtgccctccaaaaaggctctactagtttcaggtgtcagaggtctatctagatgacagagaagtatgttttatggctagggacatgtttcctttctctctgagtctctccctaaggaactggcaggctctacctttttttcctgtgtctccctttcttcaagttttgggctgttgaaattatagttttctgtcctgtagaaacttagagccctgtgattttaaaatgcagtctgaccttcaaagtagtcaatgttgttgttaaaggaagaattaattgtaggcttcctggttataataatgttcttcatccagcatctgaaagtacctaggacattagcttttttaatccacacaaaatctgaggtacagtttttgccaccttgttgttgactttcttcatgtactctgcaagccctggcctccacagtctcaaaagcaaaaactgtttttgcctccctcaagaaagtctgtgatgagtgaactatatatcttgtaacaagattttggggttgaacaggaaacaaaatgttaagtgactatagtttcagctacttttcttttgcaaaaaagggaagtaaaatttccctgtgactgtggtaatgtcccttgtatccctctcaattaagtggtattctctactgggtattgaaataaacctgtgcaaagtagtttgttatataacatttaatgggcaataaaggggtgcgcagtggttcctgctgaatgggtagtcaagttgatgcttcataactgtcgttacctattggagggagtggctagttgattttctcttttctgttgtttttttttttcctaaattagccagtatggttatttattttaagatatgaccctgggttttccaaaacagtggtgattggaaattgcgtagttggttgaatcacaaatgttgtacttaaaaagctacttatgttcatcattgtttttagaatcatcaattggcctaactcctttgcagctaattgctgacactgtattcgtattgagaagccaaagactaattcctccaggagctggggaagtctgaaaccacccccttgtgtcctgtcctttcatacttcttgcctgctggcagcctcttccacctcccacagcctactcattcctgcctactcggaggctatgatagagtctggcctctttggcgcacagtgtcctgatgatttgccgcttctgggaagaagattcacagagggaaagaactgctggttttctgggttcttgggggcaggggatgtttttgtttatgcttatgggaaccactctgagccatgggtggagaaatcatacagtcatcctacttctttccagagatcaaaattgaataggggtggggcactaggaaagagatgttcttggtgagaggcagaaagagaatatttctagatgggaactgaaggaatagagagtgaattgaggagtattatgttgtggtgactcagtttttaaagtacttcctctctgagttcctgtaatcaccaagaattttgtaggaacttaatgtttgttgcacagcagcatcagatttctgggttagagtccctaccgcacttaccacagaccttgggcaagttatttaacacctttttgtttcagtttcctcaaagtgggcatggatttgaattgtgtctcccccatagggctcttacgagaatgctttaattaatgtagagtttctcagtctcaacactgttgacatttgggctcagataattctttattgtgagagaatgttctatgcattgtaggattacagtagttaatcttgctgtgtgttagcagcctctctggcctctaccactggattctagttgtgacaaccaaaaatgtctgcaaacgttgccagtgtttcctgggggcaaaattgtctgtgcttgaaaaccacaactttaatatatagaaagccctgagcacagtgcctggtatgtagaaatgttcttcagtgtttactgcatagtaggtagcttagtaaaggtaatgaatgaatgaatgaatgaatgaatgttgatgctgctgctcttccactattgaaagagtgctagttcctttctcaacagtcacattatggaggagatcacttacggcgattcctgtggccctgcagtaactaaattatttggagtggctaccaaggggagcactgtctccctatcttgagtttcactggtattgcacagtggcacctatgaagttccagagtagcccttgctctgtatagtcttatttccaagatgcctacttttctcttgttttagtatttctgaaatcagaatggattataacatttaagggtacattaaaaaaaaattattcccccaaagctattcacacacactcgatggcagctttgacattaaggaatgtggtatttctgtgaatatctgggctttgcaactgaattggaagctccttatgggcaaaggctataatactgtgcctttttttccccagtagtgagctcagtgactggaacatactgcttcaaacttttgaacagtctgcactttcctgtgttgtgtgatgatgcccttaaactgcctttcgtatggttttggacctttatacagctcaggacaacaaacagtacagtctttcacatgatgatattagtaccaacgttttttttttcaatagtcactgttttgccctttcagcaatgagtttgagtggttatttgatcattttactgcattttgctcattataaaagtgagtatacagcacaaactaatgtccagatgctggggataaacagatatgtcgaaccttatgtagcagggttgcatcttaagtgttgttagcttaggcaaattgtactatatgctgtaaagaaagaaaaatagtgtggctaattttaccagtcattcaatgcatattgttttgaaatatgcttggagtaggaggtatgaatcaactaagatgttaagatgtaagtcccatgagggcaaggttttgctcactaccatattttcatgtagaaagtaccttaaacatagtaaacacacaaataattgtggaacgttagtcgcttttcccttattcagtctcaattcctgcaagtctctcaaactataagcatcacattgtcctgtgattccggtatttaattatatggatttttttttcatacaataaggcctctaaatgcaagccagctatctcacctggttgaaacagccatctgtgctaacatcagtgacacagcttactgtgtaggacttaactggttggcctccatgtggtgtctgtgaaattttcaaggattatattagctgacttgaaaatagccaactgaatgctcccttaaaatggaaacctgctataaaatcaagacggaggaaaatcattagatatacagtaagttatgacctcagttatatgttaggtggtcttacgctagtcaagagactgtcgtgtttacctttgaagtgctggaaatatatcccttcagactgagtcccaaaggtgaggtataagtagaaattttgtgatttgaggtggggcatacaggatcccaataacctcctgtttgactttctcacatatggttttgtgtaggaaagtaggaggaactgcctgtgataggttctaggtaaatatttgttgatggatttaacctcagattgtaacataatgaaagagataatgatctctccttgaatacagcttgatttttctttatccgtgattctactcagcccatattttgtacctttgactggttggtccgttttctagtctgcccctttcagtcccagtggaatattcaagcttatagtaaagaatgaaaatattatcattttcaaatgaccacaatctaatttgtaagtgttctacaactgaaactcatttaaagaaaggcaacaagctcaatgataagaagtctaaaaaataagagtgaaaatgttcctgcctagcctagtgtaattatttttgctgttcagttgcataggcaggctgccagaagatgggggtacgaattaattaaccaactgtttgcagagatatggccatgtaattactgataagcatggacgtaaataaggcagtgtgtcgactgtttttcagaaatgagggaagacagaaatatgttaacaaaaataaaatagaccaaaggcttagtaggggaaaagaatagtttctgttggtttccatttattagcgcataaagttcttttttcttcttgtctttaagtgctgaatgtggggaggaaatgtggattgtcacattagttttttcaaaaatacttgaatggtttatgcctcaaatgaacatatttggaactcaacccctactcaaatcattttcaatataatttttttgtacaccatagtttggggtaatagaggtttattaggccagtggtgaattttaagtagtattatgtgtaaaagtaacttacgtgaatagttttacatacacaagtgtcttaaagtaaacagtatttgtaatgtaagacgctgggtcacttctgtaagagctgaatttttaagttacttgtttactcttccctagagatgaaacatagtaggacccttagtaaatatgtgttggaggaaggaatgaagctttgtaaccagtgacgtatcattgcatgctggttagggactgggatcaggagtcaactagttttaacctttaacactagccccacctcttgtcagctgtgtgatcttgggcaagttacttaatcttgcggtgcctgcctgtttcctcatttgtaaactggggttaagaatggtacctatactacagggttgcaaggattacgtaacataaagcatggaaagtacttagcacactgtttggcccattaagttctcaataaatgtttgacatggtagctgttgttaggttgtattttaaacatttgcctgaccttttacttcagaagcactcgaaacaaatctgggaagaaataggtgttttaggttgagacatcaatctgaattgtagctggtcagggtgttagctgccaaccacatttgtttgcatatggttgtggtaaagtgagctttgagtaccttgttcaggtatgttgaccaggttccccgggaaggacaaatagtgaaactgcaaagtctgaagaagtaaaactgagataagagaatgcatgatactttcttgtggaagtattgccattaggtcttctagtttttgaaacagaaataagcagatgaactaacgatcaaaacaaacttgcatttaagtatttcccagtggtaataaactgcacctaatctgtttaaacagaaaaagcctttgtaatattaagaaggattaggagtagaagtaattaaccagcagttaacactcccctttcccctcttcagtgttgccttacaaatctctcccctcccctttccaaaccagagaaagcagctgtacacatgggttttatgcataaagtgagacctaaggaaaatgcattcaaagctaaaaaggtacaatgttgagagaagttggcattaaaaccaaaagaacagttcacacttacaggacctggtctgaccaagtgctgtcagctgtgaggcaccatgagtatttatggaatgagtggaaaagtgaaggagtctgattgatttgaattgttttcacaagcatcaatgaaagcattaagttgatgtgtatgagtgcaacagaatcttttggacacaggagatttatctttatttttattgtaacttctctttaaataaagctacctttggggaaaactttagttcacttcagtgtaagcaattagtagtttcagatattaatgcatggttctcatcattcttggaaccatattttaaattcctgggtgactttgaattattgatacttagtatgtgtgccttgccttttaaaatttttttaatttttttttttgcatatggaagaaataaagttttaggacttgatttgtaagacatttgcctgaaactaggggagaatcttcaagatgatggcttctttggtatcttggctgtctcagaggcccttagaacttagatgtcccacatatatgggcttcattctcagacctggcattcttccaggattctttctcagagactgatacctcttatccatccatcctgttctgtaagatgggaagcatggcatccttctcttcaccacctttgtatccaggctattacaaagtcatgtcaacagttccttctaaatgtcttggaatcctttctttgtcatctcactgccatccccatgtctttcaccctgtactgctgcagacagctcttgattgacctcctcacttccactttcaaaccaagcacctcccttccccatactatagtcgaagcaatgttgaacataataataaacaaactgatgatattatccttcattaaaatgcttctattaagcactaacgaatgtcagagtaaggacctccaaaaatctgctctgccataaaagcaataaaagcactggcaagaattgtcaaaatcaacttgtttagaattgtgcaaattaaccccaaaggcttgcaaattcagatgagcatatattcaagaaaaatggctgaatctgtaagtacagagaattctatagtgttttaacttgccctatttcaacctctcctccccaactccacagtaactttgaaaaccagcagcttcacaactagggtagccgtgaaagccagcagtctagcagccactggaggggacagaatgggtttggaactcccccaaagccttattttcagagaattgtcactgatgtatctggtagctccctgaaaagccccattctcaggacttgtctttatttgggctagctcagagctcattctgtgacctattcctagggtgttaaaaaaaaaaatcagcagtgattcttcaatgtcacagttgcttgaggtggtaatgccaactggggctaagaagaggctgaccaaaaaagtaaataggaaacactggggaatgagatgtcagttgggggcttcaaagagttccaccatactcctgggaatccagaaaaccacatggatgtgtagagttgtgcgcatgcccagaaaggacctgagaaggccctaatctcacctcttgctaacctggaggctgtatacaagcaggaagtgaaggctaaagcagagtcataaactccctgctggagcattgaggccatgccccatcacacacacacacacacacacacacacacacacacacacacagcccctcagccaaggctgggagccttacggcagacataaatgctacattaaccatttaaaaacgtaaagacaggtcagtagccaatgccatttcataattaattctgttctaagttgaatgagagccatggaatttacacaatatacctgacagatgtggtgttgcaatgaacaaaagaaggaatggtattcttaactgagtcatgagattataatcataaccacaataataataatagtaacaaaataaacactgttctttatcgagcccttatgtgtacactctgcttactgtgtttagacagatatagaccgcaactttttacatgaattatctcattccgtccaacagtccattaaagttgatactatcattttcaaatgtagaaactgtatgcctagatgtgcctagaggttaagtacattgctggagattacaaaaccaagctaagtggtagactcttagagcccgtatcctactctagactacatgcttgtccaaatggtagggatgcagacaagatttataaggtttttggtaggcacttccagatttgggacacatggcattgaaagcttgttttctgacttgagaggtcaggatttgctgacagtattttgaggagtagcttaaggaacccgtgagacaaacctgtcgtgtgtactgccatgttggtcactgttgtagccccacctgccattcctaacgcaggttcctcaggattttgatatttgcctactctattctatccccagcattttatctcaatttcagtacaagcaatgacaatgtaaacactgtaactcttacctgttaggggtcactattgataatattggccatttgtaattagtgagtaattaatattaggaatattttcatctttctagctccttggtcgtctggtgcaggggtccccagtctctgggcagtggaccagcaccagtctgtcagtggcctgttagcagtcaggctatggggtggggggtttgggagagagagaggaatgagcattaccgcctgaactctgcctcttgtcagatcagcggtggcattagattctcacagcagtgtgaaccctattgtgaactgcacgtgcaaggtatctaggttgtgtgctcctagaatctaactaatgtctgattatatgcggtggaacagtttcatcctgaaaccattctctccttgccccagtcccatggaaaaattgtcttccacgaaactgttccctggtgccagaaaggttggggactgctgctgtggtttttgttgcttgctttttacttgaaacatctcactttattttctttaaatctagtatttattgactgctttggtttacgcagggccagacctcatacatttagtagcttgctgattggtctctcgttggttccatcatttgacatcttttggtcaaagggaaatccagttatctttaattattggagtagacaatatgaatctgggagttgtgcttatggaaggtggaaataaaattctacctttttcctttcctacttgagactaaagctcacttaacagcaatttaaaactttaaaaatatcattgatgctacttttgattaccgactattgagagtcacctgttgaaataaatttggaactgactgtagtaaaacctgttacgtggagaccagccttcctcttctctctggtttcttagaaatatatccaacaatggagccgagagtcctagcatctcaggaaacctatgagcagcggtgagagcagacagtacagaggtacccgcaggagtctgctggcagataggaacagcttgattgacttttcatgaaatgagacagaagagcagggatttcctgggagaggtggagagtaattcaagaagggcactgagtagtggaggagctcatctaataagatggtaaagagcatgtactttggagtagcctaccttcacatcccagctcctctgcttactgactttgtgacataaggcacacagcctctctgtgctgcctcacttgctttctataaagtaggttattgaccctgagaagtcaaatgagttaatacttagcattgtacgtggaacacaggaggcactccataattgtaaactgttttatttttgttatacgtatcaacacttcgcagggttttttttcttttgtgtagggttgtgaattttgttcaccgatatatttacccaataccttgaatagtgcctagccagagtagccattcatgtatttattcagtgcataaatgaatgaatgatgtatttagaatacctgccacaataactgacacccattaagtacttaatacatagtgttacaagaggtagtggctacagaccagtagagattgaagcagtggctagtgtatcccactgatagtaaaaatagaaatgattgtaatagtattacatacatagcacatgctccatgccaaacacagttacaaaagttttatgtgtggtaattctctttatcctcataactacccttaaggttgctgctataatctctattttacaagtgagtatactgagcagagtaacttgcccaagggtcatgctcctaatgagtgataggattgggatttgaactcagttttattccagaggccattctcaaatttttttgttgaaaacctgtgtgtcaggtactgtgctatgtacttgtggcccctgacctcatggagtttaaatcttaatgaaggagatagccacaacacaaataagaaataactgagtgacaagagagaattgtgtgaagccacaggggcctgccttaaattgggtattcagggaaagtctttccaatgaaatgtgagctcaagcctagagccaggcaggcaaagcattccatacagagggaacagaactagcaaagggcccgaagtggggttggcataattgtcaaggatttcagaatgccaaagcggagagttcgaagagagcagtgtgtcttgaggttgccgatgttaggcaggaccctccagtatttgttattattctgactacattgtagaaccactgaggagattaattgggcctgatgacatttatgatttaaaagtatcactgtggttactggggagcagggggagtgtagagtgggccctggtaagcacggccagctcagagaccaaaggacgacagtggagaagatgataaaaatggcttgaatttccaaagtacttactgtgtaggaggcactatttgaagcatttacatatattcgtgtagtcctcctagtagtctgtgaggtaggtactttgactttacccatttagaaatgagaatattgaggtataggctagtaagtggcagggctgggatttgaacacaacttgagttcttctattctgtgcctaacccttcatgtgtttatattagctgcagtaaagaaggaagaaactacagactcatctttggattccttcctctgcctcagcctcacatccatggtctcctgagctctttgcagggtactctagaccatgtcttcagtctggtttcactcattttcattgtatagtctcttcctgtctcactctattgcatcagcctttgggagctgccttccttacctaggtcaatacacattcatggcagagttaccttctggatcttgtggtttccttgctaaaagttgtaggttgcccttggcttgcagtattggccctctgctgctggagccccagcatgcctcccctacctctcccttgcatggccttcagggaggagtgtgtggccagcagtaggagcacaagaccacttgagagttaagctcacattgtgaaatagtcagttgctaattggtgtatatagttgttcccccgtatctgcgggggatactttccaagatccccagtagatgcctgaaactgagggtagtactgaatcctatatatactgttttttcctgtacatacataactatgttaaagcttaacttataagtcagacacagaagagattcacaacaataattaataataaaataataataattataacagtatgccagcatttttattcttgtgctttggggccattattaagtaataagtattacttgaacacaagtactacaatagcaggagttgatctgataactactaagtgactaatggacaggtagtgtagacagtgtagatatactggacaaagggatgatacatgtcctgggcaggatggagtgggatggtgcgagatttcatcctgctgttcggaatggcttgcagtttaaaacttagaagttatttctggaattttcattttaatattttcagaccacaggtaactcacacctcagaaagcaaaaccatgaataagcggggattactgtagaccagacttctgttaattagtaagagccggggaccttgagacaaacatttctaatgtggatcaattttgtgagttatgtttttttttgttttttgttagtttttggtttttgttttttgtttgtttgtttgtttgagacagaatcttgctctgtcacccaggctgaagtgcagtggcgcagtctcagctcactgcaacctttgcctcccaggttcaagcaatcctcctgcctcagcttcccaggtagctgcaattacaagtgtaaaccaccacacccaactaatttttgtaattttagtagagatggagtttcaccatgttggccagggtggtctcaaactcctgaccttaagtgatccacccacctcggcctcccgaagtgctgggattacaggcatgagccaccgcacccaacctgtgtttttgttttcttgagctaactttattgagtgattactatcagtagtactaagcgctctccatggatcattcagtcttcacaatagtattgtgaaacacaggtcctgttaactgtattttagacacagggcaactgagattcagagaggttaaataatttaaccatgctcacatagctagtaagaggaagagtagacgtttgaatacaagtagtctcactgcagaactgcttttagctactgtgctggattcactagcacaaaagaatttgtcaacatgcagatttgagaatcagacattgaaatacagaagttttactagaaactgcctctaggtataaaatgttttcagggaagactattgaacttgaacttctctgtcactgaatggcatacccaattccagcagatgatgaccatgtgtcactaaatgacataaaagcacaattataaccttctgacttacggtggcatcacaaggacttaatctttcaattattattcatcaagtaatatttagcacatattcattgctgctttctgtcagccaggttaggcaccattaggcactgccaccagagcagtcaacaagatagatatggaatgtagtctagtgggaggaagttaaggcttgcacagctggatgaatgtttacaaatgggagatagtgcttggctaggagccctacctagccaagtctctggggaagccacattgaagctaagaccgaatgaagtagagcaacaagccaggtacaggtctgggggaactgagttccaggcaaaaagagcagcaagtaccacacaggattctgtgacgagagtgtggtgtagttcaggaacaaaaccaaggccagagtaaccagatgcagagaggcagggccaagctgttcaaggctggtgggctaggtcagggatcattgcttttatcctaagagcaactgaaagctacagaaaagttccaaatgccagtcatttacttcataaacacacagtgatagggaacttctcaggtattgtgctaggcaaggcaaagagtctgctgtccagacaggactactgaggtttccatttgtaaatttttattcataaatcataaatcagtgagtgaagggctgaaatggcaggcataaagggtatgagtaggagcctagcagagagggcattggggctagttcttgtcgaacggtgggaattgtagaaagagcagagagaagagctttctatgctgtaggagctgttctgtccaaaagaaggaattgtgggccaggcgcggtggctcacgcctataatcccagcactttgggaggctgaggcaggaggatcacaaggtcaggagattgagaccatcctggctaagacagtgaaacccgttctctactaaaaatacaaaaagaaaattagccgggcatggtagtgggcgcctgtagtcccagctactccagaggctgaggcaggagaatggcgtgaacccgggaggcggagcttgcagtgaggcgagattgtgccactgcactccagcctgggcgacagagcgagactctgtctcaaaaaaaaaaaaaaaaaggaattttaggagaacaagacaggttctgagaatgacaggagacttgaggcagaatcacattgactgaggctggagagatgggagggaccagaatgctaggtaggcgccttgttgcagagcagtaggtccagagtccaacccccactttgaagccagcaggggtcttcaagtagagaagtggtattattgctttacaagtttgtgggctcaggcagctgggaggaggaggctacgtaagaggaacaaactgtggccttgttaggagacctgttcaggtgagtagaggccccataccttgaccttgggcactggcagtgggagtggcactggcatagaggaggtgattctgggagaatactggaaattgccaggggtgttatgagtctagcagacctgggtttaaaccttgggtgtgctatatactagtttgtgagatttcaatcctgtgtgccttagtttcctgacaaataacaatcatgacttttatctcatagactgtgggcaaacattgagtgagcacttcctagggccaggtgcatttctaagactggcatgtagtagctctcttagtctttctgtcctttgaagtacccagtgaagtaggtactatggtcatcacggttcaatatgtgaagaaaatgctggccaggcgcagtagctcacacttgtaatctcagcactttgggaggccaaggtgggaggatcacttgacccaggagtttgagaccattctgggcaacatagtgagacccctgtctctacaaaaaataaaacaaaattagctgggcgtggtggtgcacacctgtgattactcctagctactcaggaggctgaggtggaaggatcgtttgagcctgggagattgaggctgcagtgagctgtgattgtgccactgcactccagcctgggcgacagaaaccttgtgtctggaaaaaaaagtgataatttgaagagattgtataacttgcccaaggtcacgtttcttttgattgagggaaccaggattcagagtgatactgacccacactcttagccactctgcttaaaatgccagtgatagtaactaactggggagggggaaggaacagccctttgaagtggtgacagctgagctgagacctgatgtgtgagaatacaccaggcatcttgtgaagtgcaagcatagagtctggctggggaaaaggtttctgggtttgaggagagaagggaggtcagtgtgcctggagcagagtgagccaaggagagagaagtggggaacgagggaacagaggatgagagggaagtgcaggtatatctggcaggaccttgggagccagggtaagggctggagttctattccaagaggagtagaaagccactggagaattttaaacaggggagtgatgtgatctggtggggaattttaaagaatcactctggcagccttgtggaaaggtttgtagactacttaggggacttcttccagagttcattgaaagggtgctggtggcaggcccaatagtggtggccatggcagtggagagaagtggatgaagattttaggatagaacttaactgggtgtgctagtggcctgaatgtgttgagggacaagagagttggaggtgacacctgggcttttagtttgagctgttgggggatgaatagtatcatttacccaaaatggggaaggttgttgggtgaggagcagagaagggtcaagagtgaagttttggacatgcttgttctgtttgaaatgtatataagacatctagatggtaatgtctagtaggcagtctggtacgtgaaactagacagagcttgggagcagtcggggctggagatagaaacttgtgagtggcatgtagaagtttgggatgcgtgggaaaagggagacacgcagggtactgggcaggttaaatgctttgcagtgccattcaggttttcttgttactgaacaaagtcctcaaaatggagatagcaacaccaaagtaaatacattcaccacagtttggggtatggtttctagcagagggacttcattctgcatgtgactgaagtttccatatacatgtgctcaagtgtccttgtgcttaaacctaatcctccctagtatgctggcctggggtctccaaagtacatgatggcctagatgtgggtgctggcccactcactaattggaacataggggtgacctaaatcctgagaaagatttagggcttacacaacaataaaatccattctttcaaattcgtttagaatccattaattcaagtacaatttttaaactttatgctcaagtacataattaatggcctaagttgtatattacaagtatattttgtaaactttttaattgaataatgaattcatttttattaattttatatttttattttctgttgtaaatcaagcttttcacagcatttgagcaagatccctattttaatttgcagacgggttgattgtgaatttatgctttaaaatatttaggaacatacatactgtctctcacacacacattatttcatttctttctgttgccacaacattccacactctgttcctgttgctaaggcccctggaatgtcccagagcagaaaaagaatatagaattccttttttttttttttttcctgaagaagcattttatttaaattattttgtatcctctagtttacttccaaatatggatatctgaaagtgaagaatttagaaagctaaaattaaagttgctttacgttttcataaaatgaactcaatttctttttctttttgtgagacagagtctcactctttcacccaggctggagtgcagtggcgcaatcttggctcatggcaacctccacctcccaggttcaagtgattctcctgcctcagcctcctgagtagctgtggttacaggcacctgccaccacacccagctaatttttgtatttttagtagagacagggtttactatgttggccatgctggtctcgaactcctgacctcgggtaatccgccttcctcggcctcccaaagtgctggaattacaggcatgagccaccgcgcctggcccagggagctcagtttcatagggtagaatgaactgggtttaagtataccatgtttcttcccacagagggggtgtgtgtgtgcatgctttttagagagattcagtgtgctcatgagaaattaagaaccgagttttccggtcacacaaaccagagtcctggttatgccgctttcttgctgagtgatattaaataagtttgtttctccataagtaaaatggggattattatgtagggttattattagaaataaatgggaaaaaccatgtaagaactgcttggcataggacctggcacatagtagtctctcagtaaatgtcagctggttatcattatagtcatcatcagttgcaattgatcttaagttattgaggaaatagaaatttttacagaagtatagattcttggttccttacaggataacccctatctttttagttttactagtcctaagtctcagaaaaggatcaaaggaaccagggcaaaaaagaataattttgtacatgataaacatcatgtgacaaattgaatccttattatttgaaaggatcagtttaggtttttatttctcttaattgctttatttttaaaggggtagagggttagtccacagaagaatctggtatctggcaaagtgatctattttaagcaacagtgctttacattcagaactgagggaaatcacagagaccaccagcagcacattgcagagacctaaaactaaactaacactgtttatttaatactgttttaactgctatctaataataaaactaattgagttgatttcattaatgaaattgttcatttgatatctatctcacactcttcagttgtaaattatgaatgttataccagttctgtaatttagatgtatcagaggcatttagcacagaagcatatggaacttacggtaaatgactttaaattttatttttcagaatgaaatgtcatgtcaagaaactgtaatcttggaaagtgacttattacatgtatatcattgcatagatataacctttccccttctcccacatgtactatatttaactcaatgtgggcaggctttcagggaaaatagcatattgtttggctcttattttttattaaataagcgtagtcacagaagtctgtagtctactggaagcttcttatctaatcagtttataccatcaaagatggtcagccctgacattccaatttattgacattggaatctggaaggactctctagatatcattattcctctggtcttcaagaggtaagaaatccaagccacattataagtcagaattgaattccagctattgaccttagacaaagtactttacctctctgtgagtcagttttctcttctttagaggggggatataatgatgtctacctaggtagttgtgaggataaaaatgaaataatagcttgtagaaactactcggtgctgcaagtacatccccaaatcgtgctagactctagtatatttcggattatagctagctatctgtgcaattcagtgtaatagaaactgtttaagaaaattcaagccatagccatgtgtagatactagatcagtaatttgatattttagagattatcctcacttgacatctccttaaggaattttcttctccctttaaaaccaccaggatctccccggctggagaaagtgtgaaattaaatcttcataggaaagaaagtagatgctaatcagctttttggatcttcccccttgtcctttaaacttggtatttgatctactaaaacttttgcttaaattgaagtgtgctaattatccattcattgcagatattctaaagagtgaatgtagtgtaaaatgctgtttaaaatccactgattttgaaatacttaaaaagttagattctggatctgaacttttagctctgttccccaaattgttgttcataattaattgaatggttgagatgttttagttaaccatatttaccaggtatcaagttactttcagttttcatgtatatgcagacagtttagttttacttttgcatttaattaagttgctgtcttactgttaaaacaaacaaacagctcgtatcctaccctattttggtaaccaaactgattaatatatgaaatgctgtttgtactaaagttcattctgcctttctggtggcattagtatgtaagcaaaaggactagaggttgctatgacttggaaaaaatatattaaaataattttctttatatgacatgctggcaaaccagcagttctattcctctgtctctgctccctttcttaattgttccatagaactcaggaaccagagagctggaatagaatgcacagttaaacaaaagcattagatggtacagctttgtgaactaagcagtttacatggttgcagattctttcccttaactcttggtagagttcatctaatgttgctttattgtgcaaatatattcattgtttgcattttaaaagattgtttcaccacatcataattatttttggtgcactttaaccctttttaaagtgtgtctgtaagcctgatttgatttctctgtttaatagtggtggtgtaccacatcagttcatttgtcctggtatactttacaataaggcaactcctttagaaagtagtttcccaaaatggttttatatcagtcagaaccagatgagtgagtgatgctctgtttctgtgttgcagacatgccaatatttggtttctgtccagcccatgatgatttctacttggtggtgtgtaacgactgtaatcaggttgtcaaaccgcaggcatttcaatcacattatggtaagtgcttaaccatttaaaaaattgttaatagaaggtaaaaggtaaagcaagattaaactaaggaacagtgatggcatgcatgggacataatgtccctcccccaccaggaagtaggctttttaattcactcagtgggttaataactatcagatgttgggtatttttaaatttttattaaaagtgataggaattttttgacttttattgaaattagagaaagtatagtttataaaatgtctcttaaaatgttgcatcagtataattacaagtttgtttccttctggagcccctggttgtgaattcagtggattttaaaattatatacactcacaatatggatgcatgggcctttttttttttttttttttttttttttttttaaggaaatgtgattttgaaacttctctgttcaatagttctaaatattgggtgttaattgttgaagaatccaaatacagttagttggcattgtcataatgcctttaaagtgtttaagattctgattctaaaacttggttttctgcccagtttggctcaatagcaaatcataagtatttgaatacgtaccttgtttcaggcattgagtatgtagtatgattcttaccgccacagagtttacagtcgaattggagaggcaggcaaaactaactagatatactttaaaaataactataagttttttcctcattgctcttactactacaaatgcaagcttgcaatagagtaacattggggttcttctatagatagagtgtttaaagaaagcatcttaggaggtgacactggagctgagtcctaagtgatgagaaggagcaactcgggcagcaatctagaataagagcgtttgatgcagagggaacagccagcacacagaaggcccgtgtggctgaagggtatttagtatttagagaagggaggtagaaactggaggaatccagcattataagcaggaacctgatattcataggccaggctaagaagcagcttgggagcactggaggatttatgtaagagagtaacacagtcctatttcagtggttgatttgctgagaaaaatttctgggagaaggacagaagtagggggaatagttcagaggcaagagatgacaccggactgagagtaagatctggcagtagagctaggaagactgcatagctttgagatacttcttttttttttttttttgagacggcctctctgtcatccacgttggagtgcagtggtgcgatctcggctcactgcaacctccgcctcccagattcaagcaattcccttgcttcagtctcctgagtagctgggactacaggcacccgccaccaccatctaatttttgtatttttagtagagacagggtttcaccatgttggccaggctggtctcgaactcctgacctcaagtgatccgcccacctctgcctcccaaagtgctaggattacaggcatgagccacgcgctcagccaagagacgttttaaagttagaatttacagatcttggctgtcgagactgctgttgttgggttaagagtcacaccatcataagcaacattccaccattttttcaaggaataataaatcctttatttaaccataaaaagattctttgagttcctgcttctaggagaagccctagggtaggcactagagtgggtacagaggtggataagatgtcatttccctgcttctgagttgtggacaatacagacaatattttggaaaaatcacttgtaatgcactaaagatgggaggtgttttactggggatagacagagctgccacatatggctgcacagtttgtgcactgaacaaccatatttggtggccccggattggcaacaaggttgacgtgagcaagcacaggagcaggaaattccaggctctctgggatgtgctgcacgagtcaccattggccagaactgatgtacccacctgtggatgagtggagtgcaaaggcaggctgggactagctcacagggcctcagtgccaatcggagttccctgctctggacgtgttggtgaggacctgttgcagattttttagaaccagagtgatgtgacttagtggtgccccagagaattgatgggtagagtggattccttaggcagaaagaagacctattctaggagcatttactcactggttacagtatacttattttttttttaatcttctcatttccctcttagaatatcagtgtacgggtaggaaaaagtgtttttttttttgtttttttttttttttgagacggagtctcgctctgtcacccaagctggagtgtagtggcgccatctcggctcactgcaacctctgcctcctgggttcaagcaattctcctgcctcagcctcccgagtagctgggattacaggtgcatgccactatgcccggctaatttttgtatttttattagaaatggcgtttcaccatgttggccaggctggtctggaactcctgacctcaagtgatttgcctgcctccccttcccaaagtacagggaatataggcatgagccaccaagcccggccaggaaaatatcttaaaatcacatttttctgtctttctcctttcctgcctttcagtccctagcacggtatctcctaataagatacttgttgaatgacaaagcgttggtgataacttcaaacatgtaaatgggaaagtgtgaattcaagattcatttactccaaggtctcctgtggcttggcaggagatgtgactgacaaagccactaggtaggagggctgaggtccctctagtgacaagggaaatattaaagatatgagagaggagagttcctggcagaaagatgagggccaagtgctctgagagagggattctgctgggaaatgtgtaaggaatgccctctttgaatcagcagtggagatggctgctggtggaattgacaagaggtttagaggtggatgggggtttgggagagtaactgcatgaagtagagggaggcaccatgtggtggccctggagtgacaccccacttacttggagggaaggagaggtgggcagggttcccaggaccaacaacctttcccagtgctgccacagtgtcgtctatcttttggggacaggggttgtgacaggaaagattatttttggtacattttcttttttgttgaaatttttagaaagccagttgttgcattattgttttccacagttaacaaaacacagttttcaaattcagaatctttcacagtgactgttgtagtctatttacgtgccaaaagagggatggtattttctttcagtgatattggtgaaaatgtgtcggcagtcttctgtgaattcatgtattgctgatatccatctgtgacttttatgaacaaatgaatagttcctaccaactccagcaggcagttccgttaaaaccactgctaccaggacaagaaaacatgctaccgtggcagcaagtcttgtaaaatcagtcagtgttggtggtaaaactattctgaattggtgagcagcttattattcggagtagttaagaagccctgtacttttttgctagccaagctgcagttttaggagttaacaattaaccaggatttccatttgagcaatgatggtgaatgattgtgctgccattttggcatttccagttttttcagtctgattgctctcacagcatagtttgctttcttggaaactacatagtaataccatgatttcttgatgttgttttaatgttttaaaatactccagtgtgcctcatatttctcttcagttacttagtatttttaagaataaggtgtgaaaccccgtctgtactaaaaatacaaaaaataagccaggcgtggtggcgtgcgctcccacttgggaggctgaggcaggagaatggcgtgaacgctggaggtggagcttgcagtgagccgagatagcaccactgcactggagcctgggtgacggagcgagactgcatctcaaaaaaaaaaaaaaaaaaaaaaaaaagagtaaggtgtttcttactgctaatttcagatttaaaaatataattcgaatcagtggatcccaaacctgctgtgcatctgaatcaaagaggagctttctaagtgagcagcttcccaaggcccactccagatgctctgagtgggaatttccagagatagaacccaggaatctgcattctaaacagctccctgggctgattctgacacactggctggctggaatgcattgctttcacagatgcagatacagtccactctggtggagctgctgcttggtacatacagtgggagacatacaatgactgacaagagattggtgctcagagattcgttgagccaaccagaatggcaggaagggaggcccctactttttaaagtatgtgtattatgtgctgcaaatgtcacattaattgccagagaacttttaagtaggaagcagcgttgagatggtgacgttccgaaagtcagaagccccattcttttgaggtgggaatcttaagttcttcagttagtttagtgataagtgtgttggtcctatactggctactgaatagcataaactgtgtagtactacttacatgcatttactctggatctgaatggtgggattagcacagggttagcagatgacttgtggggtgtttttgaggctgtatactgagagcttcccaggaattcctattttgtgctctgcagcttcactgagtttgcttatgaagaataccttaatgtttctcttttatgcagacacaggggtgatattacctaggagaaatagatgaatgatgtttattcagcttggacaagtaccacatttagaatctctgtgattaattgaaaccctactcagatgttggctgtttaagtatttgcttcagattagttaggctgatccatttgttcacctttgggctcagcttgagtctctaagcaggttggagcagccactttttcccaaccttaatcaagtgctggttttatcatctgctgacttaattccacttagtatttttctttaaatcagaccacttttatttaaataaatcaatttacaaggaaaatcttagtagaacaataaagggggaaactagtgttgtctgctataagaagtagtaaatgtgaaaatgaatactgtgaaaagaaaattatttaattttatgttgatgcttttgccagtgctggctctgagcctgaggcttgctctctgttaaaatggagactagcacattttaggcaagtgttgtccacacagtagtgtgatattatcaggaaaatggaaagagattggaaagggagtaagttttcacttgtcatttgatgttattaatattagagagtgatacctactccatattgttgggaaataccagctcaagttcttgaattttgttaaatcagatgtttaaagagctatctactgaggccagccttagccctaggaaataacagaccttgaaaacagaattttagaatctcatgttgatctgtaagaagaccacgtaagacaaataccctttgtcacctatcgataatgttatatattgagccactactgatcactgtgaatggtatttgagtctgttggtgaggcttcagtgtaaaacatctgcatttctctcagactgttcacaaacggaagtgtcaaaatttggctttttcatgactttatgaacgtagttttagtagaaacactcctgtgatcttacagctttctctccttgcacatattacaaatcctgtaaaattaacagccacacacattgcttggacttaatgttccttgatatgcattgaggtggtttggattcttttagatgctatcataaattatattttctgaaacgtcattttcatcaggatgaacaaattacttatatattcatatgagaaattactcatacttttttgagctaagtaattggtttcaaagaatgttagtactataagagaaaaatgaattttttctctgagatctgatggactggttctggcaaaaatgctggttctcattgttgacaacatttctcatagttctgaccagcaattgccatcgtataattatcttgcatcacaaagcaaaggttttaccatttaatacagaacacttccctccccttttgctctctgattaacttagacctggaaagtaacaggttcagatagtttttaacatgtcattttatttagctcataactgtttttgataaagaaagaaaatgttttttttctcttaagtatgctaaatttaagtccactgactaatgataacttttaatagtacctggtgatttacagagaatttttgcatgtattatcttatttcctgttcttaacaatccactgaatagattttatgcttagtttacagatcaaagtcgtaaattaaatttcattcacacagataaaatataccaaccagaccatcttttctacctactaacattgatttattttgcatgataaggatgtatagagtaaaaaaaattcggagacaatatgaattgcatgtgtcacaaaactatcattagtgacagatgttctagctgaagtagaattttaagtttgcttcaagaagctggatcagtattgtaaacctgttacctcagaacatttagtaattcaaagatataatgatggtaggtagataattgatttagcgtagtcattggatttctcttctgcctgttctactttatttaattctaaatcatagtcgctatctaaagccaaactcctcctctttttgtatgagactcgtagcattttgtagcttctttagagaattggctgacatgtttatttctgcagtcagtataaagactgaaacttgttgcagagcaaaaaaaaattacctcactcttttgcttggaagacttgtaccaggtctttctccagcagtcgggggatgagccagggatgggagctaaccaaaacaggcacatgaaaacatgaatgatgtcaaggtggacattagtttaactctggaaggaaattccaggttggccttttgccctaaacttcttgtcattaagtaaccatttttggataaagaaagaaaatgttttttatttcacttgtcatttattgttattaatattagagagtgatagcgtgacatacagtgtattcatttttttctctgctacaagtgaaaaaatgctaattaaatttttcagataacttaagtagcattagataaaggtttattctctctcagctaatataaatttatcttttttccttagttgtattataagcaaatatctttaaaataaagttatgtcatttgtaggagcaacattttaatttctagatataaaatgtacttatttttcctcttactgatatctgtgcttttatgaatgtctgtgcctttggggctgctttagaaaggaattaaactagcaatggtattattcatgcatttaacaaaatttactggtgcctaatatatgctaggcattgccctccactgaggtaggaaaacagtgtctatgatttcatgcaccttatattctgacttaatacaatacattgtattaaggaggagagagaaaaatgaaattgtgtgaaatcagattgtttcaggtagtgataaatgctaggaataatgtgagagaaaatgactggggcagaccactttaggtaaggctagttaaagaaagcctgtctctggagttgatgtttaaactcagtgatgaaagagagccagcccatttgaagatgtagaggacaagtgcttcacatagaggaaatagcaagtgcagaggtccttagatggaagtggtcttggcagaaaggccagtgaggaggcctaaggacagtgtgcaaggaggaaaggggtccaagttgaaactggagaaagtgggtccaggaccagatgacactgggccctgcaagccatgagaagaatcaggattggacggcgcaggcaatgggaagtcgctggagggttttggccaggaagtgttatgatcacgtggttgctgtatggaacacggggcaaatgtggaaccagggagaccagttagtgagctgttttatactagttaaggtgagagctggatcaggagagaaagcttagattaggattgtagcagcaggggcagagaagtgtgaacagaattaaaatctgcatcggaaatataaagccagcagggcttgctgatggactgggaaaggaagggaggaggaatgactcatggggtttttggctcaagcagctggatgaatttacttgagcttatggatcaggaggttgttctttcagtttgtatatgggcatttatttttaatgaggtgcactgacctgaataaaaagtgttgatgtattatattaagtctttaggcattttctaaagattatagaagaaaataattattgcagtgatgccaagttgggggtggggggtcattttttcttttcagttttttaatgtttctgtaatctagtcatacaagccaggaaacaaaagatactgtgtgcactttcctgggacttctcatgtattcattgggtaattgtgaaaatttattgactaacaaaaaccactgcctttcaatttgtttttaattattaaaataaaatacattgtaaaagaaattaaacaaccagaggataagtatgcaatcagactgaagaaagctccttcatcttacttttcaggggtacagtttgacatgtactcttggagggttcctagaacctggacaaagtaatatttaccaatgtattttttcccctcacataaaaaaaagtagattcagtgtgaatttacatttttaacttaataatctatctaaaatattttttcatgttaatacatattgttctgctataatctttttaaggactgcctgttattccactttattaatgtattttcacttaacctgactcctgttgatggacacttagatcttcagtgttgcattactgtatacagtgctctaaggaccgtccttctttgggaatgtctgtcagtattttagcatattgattctccgcatggaacctggtcacagtgccctccaggtttgtactactgtgatttgatgaactacttcagcagttctgatttgggttgccacaataataaggcagtgaaaatgtgagtttctggcaatatctatctttatatatatataaattgtttataatgtgtatatggatcaaaacattacactgtactgtaaatatatagaacttttatttgtcatttataccttaataaagtagaggaaaaaacagttggaaattttttttaaaaaggcttaataaaaattaagtaagaaattattatttaatatatatatgaattgttgatattcaccagtgtcactcttgacttgcctgctacatgtagaaatcattagctattataggattgccatgcttcagctttaatggagatatttcgggatataaatccatattttatttatattttctaaaaagtacttttcctgacagtcatttcacaagactaatttgtacgatgactaagataaacacacctgcgatttcaaccccactaagctgtgatcttacatatgaccagaagagggagtttttatcacttcttaatgctgtggtacctactacctgactggaataattcctctgatgtatgtactagtccaagtccataaaacagactggtttgggaggggcccaatagctaaatttagctatttccctcatcccacattttgtatgtagaaatcccactcttgaggtttacttcaaagtaattttataccttttcatcttgtgcatttgaatgttaaaaaagaagaacagataattatttccatttaaaataaaatacaaatagcccctgatcacacaatatagagttcttggtttgtattctcttcaggtcacaaataaactttggaatgaaatttgtttcgttgcctcttatgcttgatatatttattaaaaaggtcgttagaacttctgttttgtttttttgagacagagtcccactgtctcgctcaggatggagtacagtggtgcaatctcagctcactgcagcctccatctcccaggttcaagtgattctcgtgcctcagcctcccgagtaactgggactacaggcatgcaccaccacacccagctaatttgtgcatttttagtagagacagaatttcgccatgttggccaggctggtcttgaactcctgacctcaagtcatctgcctgcctcagcctcccaaagtgctgggattataggcgtgaaccaccatgcctggcctacaacttctaatactgaagatttgtagtgagctttagagagttaagatgttattttgccaaagtggctaataggcctttttctgggtgattcaactgtggtctgttgtgctacttgagtctcagtctgcttagccaaacaaattaagagagtgacaataatcaagatacacttgtttgatgtaataccagaattttgtatttcttttttttttttttttttcttcttcaagacagattctcactctcttgcccaggctagagtgcagtggcgtgatcttggctcactgtaacccccacctcccgggctcaagcaatccttccacctcagcccttccagtacctgggactacaggcacacgccaccacacctagctaatttttgtattttttgtagaggcagggtttcaccatgttgcccaggctggtctcaaactcctgggctgaagcaatccacctgcctctgcctcctgaagtgctgggattacaggtgtgaaccaccacactcggccagaattttgtatttaatttttcttagctaccttcacagtgcatttttgtaacacaaattttttagacctgtttctttatagattttttgattggcatatgaatatatgaaatatatacacctataacgtatttttatataaatacacaaatgtaatcatctcaactattttcagtgcagcctttttcttatttcattggctctttcaacttacctgccttctctaactgtagcagtccatgctacgctataaatcatacatgctgcattcttagtatgtaacttaatatgcatccttgtatatttttctcatgcttctaactctatccaggcacatagaatcacgtattttattagtaggggcttttggtgatagttttacaaaaaagtggatcctattatgcacacttctgctccttttctactcaacaatacctcatgtaaatccattcacagccctggataacactaatcccctctttttaatggttgcatactgctctaaagtgtggctgtgctgtagcttcctctgccaggccctctatggacattcattttgtttcttgctttttgtctgtgtgaaccaaacagcagtacccactctggtacatacatacttaattactggtggtttagtttctgtgggatagagtctcaggaagggattcctgggtcacaaaagactagttatttgcagtgttaatagctgctgctggattgctttccaaaaaggctgtaatgctttatatctctaccagccactatgagagttatctccaaaggagtaggtgttgtatttatttttctaagcttccatttaattttctaaagcctcttacaatgttccttagacacataaacacacacacacacacacacacacacacacacacacgtatgattaattttaatttgaaataaattcctcaaacaaccacaagtctagtaatacttaataatatgagacaaagagatctttcaaaacgagtgattattttaaaaaatatttaaacaattataggcagtttctcgggcgtctatgggaagtttctattcattctgtatggaatttaaggaagaaatctcattctcttatgctaggattcccctgtgcaaaatgtgaggcctcctagaggatcataattttgagtgtgattaattgcaaggccaaggaaaaactatggccagttttgtttctgatctccctatcctctttgcagttggtatgactggtcaccttataaaggtgttcattgtgtgtttcaaataatgactgggctgaggtcacgctgtggttaactcaaagcctgtgtaaatcaggccatgaagatatattttatttgcctgccttacacacatgaagtgtggctgagccctggagagccatcgaccaaaagatcagctggaggaaggctgctgcatggttttagcccccaaggtgaattatccccatttaaatttcatctcccacctctcctaatccagtgtgagtacctaatgagctctggataataacatagcaacatttctaggtgaagctaatctgattctggatagcaggcttccaggcccacagccgaatgaattgcttggtatttccaagtttgaaaatacttttttcccctttcaagtgctccttggcagcaggtaaggaatgttaaagctcctgtaagtgccaattaaggccaattataactcacccggcctgctgagacagtgaagtggagttagtggagacttgtattcctgtaaaatggagaactggctttcaccaatgataggaacacagtatttcataactgccaacagcttgtttattgccctccagagcactgaatgacacctctgctggcttctcaaggattcagtttaggaaatcccaagatttgtaggggacttgactaatttctataatagaaacctcagtttttctgtttctgtttaactcctctatcatccatccagtttctccttggttgtaatcataatagctaacatttgctgaacgtttaacaagtgctgggcgttgcattacctgcattatctcaaatttactcctcaccccaggcttgtgggaggaggcagtatcagtccttagctctcctgagtctcttgcccacggctgcacaactagaagtgctcagactgcaggctggctgccccctgaacccaaaccttgagtgttcctcctagcctcctgcaagtttgcctgtttgctgcgaataggctaatgcacagttcagaactccctttgtgcactagagtaaaattgacatgtgtacaccatccaaaccacagctgatacatataattttcggtcagtgaggcacggatgttattctattaagatgttattttagtctgtagtatttttttagtctgtagtcttaatttttttcttagggaaaaagaaatatgaccatgtccccagacctagacaattaacgtctgagccatcattgggatatttaatatcaaaataaactttatttggataggatatcgagaaacggtttgaagaaaattgtgataatgctttacaagcagaacaaagcagtatttgcttaaacattttattcagggcattaagggggcacatgtgagtgtttaaaattttaatctgagctttgttctcaatttctgtgtatgtgtacaaaattaatattttcctggcatacacgaccattcatcccttttctgatgtaggtcttaaaaataagttaaaattcgtttttctcttgtttatttgtgaacttaaatatagacgtttgtttgtagcatttaagaacatttgctaaaattcaccctggttttttacagggttgcagaacgacttgattcttagaactgtcttggattggctgactctcataacgatatttttccccactgtatttcgtacaatcactgtgtacgaaagggaatattagaaaggcaagcatttgtgctaggaaggccagcaaggactctggtgttctgtcatacaagtacagtgatagggaagtgagatttagctccagaaagatcctcctaccctgttcttttctgctattgatggcattaaggagattccttggctacccctgcagggagggcaggtgaagtagggtgaacaatactaagacctgtggcaatcaggttttacagccatggaattttttttttctagcttaagaaaagcttcagtgaattaacttaaaattcttattttcgcttatgagcttttaaaaagatttgggagatgtatcctcatcctgtgcttctaaggcttgctgatggctcttcccttgcgttcttctagtgtcttctaagggcttccatagttttggattgtatgaacgttactgtaaggaatctgggggaaaaaaagtgggtttcagaaaaccccctgggtcttagtattgttgacatgggttgggatctgaatccttgtgaaaatagggcagtgcagctactgttcttctgttttagagtcaatttagaatttggtctaatagaagccgttttcatgcctctctcagaactcttccccgcacctttcaggctaaatcatttccacatatgtaattcatgacttttgccaaatattctgtatggggtgataggattctgtagaagaatcttttgctgcttcttttgacatttaaaagagttcattttgaactatcaggtatctaagtcattattatcataaaactcagatcacttggcagttttttccatgtcacttgtggggattttttgttgttgttttgtttttattagaactctgtcacctgggctggagtgcggtggcacagtcatagcttactgcagcctcaaactcctggactcttgcctcaccctcccaggtagttgggattacaggtgtgagccattacaccccattctgtgtcatttgacagtagatttgttgattggccagagagagggagtgtgatagggatgatagggaaacaggccaggaagacactgttttcaagggggcactcagtgagagaaattcttggatttaaaagtatgaaagctttagtcagtcctctagtgattgaacaacaaactggacaaatgtggatatgaaattatacatattttacaaatatgcacagaaagtgggttcagatattttgttactagatttaggaaggaaaagtatgcttaggaataataaactttttttgaaaagcttagcaactgtagatagtataggggaaataaaacctggaaaaatgctgcaggtattttatagaaatgtttaactttaagacctttaggtctaccgagacttaaaatgtaggtttttaaataaatcatgtaagttttgtaatatacctggtagtagctttgtcagtttaaaggtattcagaaaaaaaattcacaaaatataagtaatttgcattttagcaggttaaacttataaattccatcttccccagttttgacaagttgcctttccaatagaaagattaatttacaccagccaggacgccttgtatgaccatattagatgaaattagactccaccccctgttttctgttgatctgccaggacctttgtaattcaagtgctttttacagtagtagcaaatgttacataagcccaaacatggagcatatttggagttggtgggcagacccaaatcatgatgcaagcctgcagtagcaagtgtgcaatgaagcacaaccaaattctgtgaatggaaggtagcaagacgcctctccaaagcagcccttctgcgcaggagctgaaagctccactgggtaagttttctgaggcagttttcagagtctgggcttggctcagggcccagctctggatgagcctgtggacggtggggtaggtctttgctaaccttacatagaaccaagcagatttgggaagagtttatgcaggcctttttcctcctggcatttgtcttgccttgccagcaggccaggagggttctgctgctcaagtagtggagggagggagcctgcagagctaggggatcagcgtgggtaatcgcagccacagggattagctgctgcaagctgtccacagaagccattctgaaatgtcatttgagtgatctggccaaagttcagatgcagacgggagccgagtttgttattaactccaacaaaatgctgaggtttgcaccaaacagttcccatatctcaaaacagagagagtattggttacatctctctctaaaaatggaggaacgttgtaacacgctttaactgtttgttttttatcttacttgtggtaagtgaggtttcatgacaggcagtttgcagtgtttcctgtagaatgtgtttgaaagctgttttgtcagatacttcaattccacagcaaagtttcaaacagaacactgcgtcaagaggaagaacaacttcaaaatacaaacagtaaccctgggaagtcattcagtaacttaaattgagtgtataaaaatttaattatggactgactgccagaaaagatgattttttttagttgtgttattaaggtagccagcagagctaagctgattcttgggtggatgtgtggaggctggtctcaatattaccttacctgtctcagaccttctgtcttcatgcgggaagtgaggtgtcaattgagttcttcagttttcaggggattcagatttcatgccttgtgtaataatgagcttgaccggaaggttttaattgaggttgaaattgagctccccagttgtaggactttaaatatgaaaagatcttaaacctttaatcaaattgctgttgattctctataattgatttttctgaaaactcttgtcagacagttttaggttcactgtttctgctttcgtttttgcatgtcacttctgatgttttattagttgacagccctggcatgcaggtggagcagatactgtttctctcttcagaaaaaataaatgtgtgttgcagactcattgaaaacattggcattcctgggtaattaatcactcattccttattaaaagaatgtataatgaaggaatctgtaaggctgtgttcaaaatgtgaggtttttcttatttccatgttctggtcttcaggtattctgccctcccccacccagaataaggtgatataaaaaggatataaaaccagtggaaaatggcaataaggattgtgactggctcagtgtagcacttttcagcagatagttttgtcatttcgttgtaccttgcagagttgctcttgtttgttggactgtgggaagatgatgctccctgttgggattcctacacagaaatttctattttaaaagacaaaacagaaacaaccaaacaaaaacaaggcagctcctctaaattgagttttaccaggttccttttattctctctctttttatgtttttgtaaaaattggattggagtggttaacggcatagttttgttttgtttttttaattgtcttttagcattttggtaatagcccatatgtttcatttgggaaaacagtgacctagaccaaattgagactatagagatacttgtgtaaagactgagtatgtttgatgcttgaactacagatagtataacaaattggaaggctatccttataaaggtaaattgctaaaattctaaagtgttcttttccctaacacatagaggattgaatcaaaagtagctagagactggtggattttcgttttggctctctcttttcttctcacctgtatacctgaggtatagaaacagttcaagtgaatgatggtgtaagagggagaaaggggagtgaaattttacaaaatgatgtgcatcactcagatagtgaggtcaaataaatcggccagggtgatttattgctgtactctgtcagcatcatttgggtaacaccgtgctctctgaggatagcagagagaagtccttatggctgttagcaaagtagaagtgtcagccagcatgtcattcattgtgtggtatctgtagtcagaaacagtgacataaagatcacagaggtggcataaacagttggatggttgtgttaacactcaaaagcaacagcatccttttcccaaaatgtactttccctaagtgttgtgtgtatgcatgtgttagagaggatgataatcctctggtcaaaagtctgcaccttgaacagggttgcaggagcataaaaagggcgtccttcaggaactgaactgatcactcagaccactcagttttatgtaagacaagctgttttttgaaagacaaaaaaaaagggtgttatactcatagctgaggtgatcaactgttgtgacattctgtacctcctctttttccctatcattccgtatttttcaataaaatatttggattttttttaaagcccttttacaaatgtttgcaaaaagcaacaagttaggcagggaaggagtatcccccagatattcaataactttttcatatttctcacatacttgaaagcagagtttagaaagaacagtccttttgggaagaattcctggcaagaggattatttgaggttgccatatttctgctcctttcttagcaacattatttacaatccattcacgcctgtcccttcccccactggagtggagtcgttctcccttgtaatctgccctttgtgatctgttctctttcatgcagccagtgtgaatgggtatgctgcagtgcgcgctctgcccagagacgtggaaatgccaggagacccgaatactttagtggggcctttatttatgtcataaagcgctgacttcaagagcttgataatttgattaggacctttggtgaaaagttgtttcaagtggcccaagtgctataaatgactctcttttctgcactttcccgttaggttttaatttaaaagcacctccgcattagggggaggagagatgcctttggcagaggtagcagttggagactaatttgttagggcagccagtgttgaaatcatccttttcagttaaatctctctagtggaaatgatgccgagtgctttgtggcaaggactttttctttctcagtgttttccagtgccatttgtaacccacctaagcatgctctggagttgcctcccagccccaattttggctaattgtcctttgaggcactgcatgtcagaggtcagttctgaattccccaacttgagatttgaatgttccagggacagtcccaccgacttgcttccttttaagcaattagactacactcagctctctctggaatagtttcatcaagtgcctggggaacataaagaaattggatcaaagataaagcagatttaggaataaaaaggacctgggactacaaagagtggatggagtaggaccatgtttgcttgtcaggccatatgtgagtgcttttaagaagaataagaaaatttagagggaaaagttgacaacaatgaaagtagtgaggaaatattaaatgctcgatgttcatgtgtagtccatggtgtgattttcaatggtatgccaaatattttttaatattcgtgagaaaaaatatatacatatatatataaaaaactcctacatcaaatacaaagtcattctttcagagatattattgcttaggataatgctaaattagtccctagtcagccactgaattttaaaaaatatattaagtaaataatggtctagatattgtgcagatttggaaaaggatccaaaatatggtttagttgtgaataacaaaagtttagggaaaacactagtctggagcaaagtagatgtgtaagaaaaaagtgctgagttttttttgtttttgtttttgtttttgttttatgcagtctttatttctagtttgcctcaggtcctgctcttggatgttttcttaaggagttataatccttgtgaaagacacatgatgccaattgacacctcacgagttgtgtttggtggcctggaaatggattatgacagtttggattaattgggagctgtataatagcaagctgcagttatttttcaacctggacataaaaataaacaataaataattttgtgaagggacagcttaatgaatgacctgaagtttttaaactgagcttttgatacatgcgttgttacttactgtgactggccaaagactgtgtgcatgtttacctatgttttacattttatagccatgtataaccttcattattgaaagtccttgctttaaatgggcgtcattatgggatgtttgtggaatggagctgtcagaaggcatgaagtcatgcattccttgaagcatgcattggtatttctcataaggcccatccatgcagagtgcacactctgtttaaccttaactgagtctatctgaaagtgtgagtgagtttcatttaaagaaaaatatgtgggttttacttagaaaatctgcccaaaatttccacctttggatctgtaaactgaatttgagacttgatcttcattttattctacttgcagttcttcctgagtgtcttctgagttctgtgaggaaaatgagccagccttttatttgtaaaataactttagcttgaatgaatgttctttttgtttggtgtgaatttgctgatttttaaatgaattcttaaagttgctcccctgagctcctatcttagaagaggttgatatcttcctgaaatggcacgtaaaaatatgtatactaaatccttatcacactggagaagataacttacagtaaagagggtttgatttgttcttaagtgatttctacctcctttagaagtcaggaggtgttatttgtgagtacttttctgtctaaataaacaagcctgtagctggtatcagccaagctaacagggggcctctgtcttatgtgctgatgtgttcccagtacttggtccacagtaggctctgtgctgcaggctttgcaactcttgatcgtttaatccacagcagccctgcaaagtaggcttggcaactgaagacgctgccaacgaggatggagtgagctggttgcccagggtcacccaattagtaactggcagagcaaggatatgaacccacatatccctgactctaaagttcttgcccttttcaggtaatcttttaaaaagtgtttttatttgatttggattctattcaggctgattactcaacccatacatatcaagactgtgcccagcagtcctgagcctctgctgggaaggtgaccataaacaacctgagagtgactcgaagcatgcatattgtgttgtgtattggttggtgggtccagccttaccctattgagcaggtgtttgctgatggtcttttgtagagcatcctcacctggaaactgtgtaagttgattctttttagccaagctataaagacagccccaattggcacattctgtcacagttcactcttcaaactgatgcaggatttttcttcttggtcactctgcaaaccagggatgcccggccagtgatacgccctgcttgggcctccctcggccacgctgggtgtgccgcagcttgcctgtgttaaggttgtacctgcgtttggcagttcctgagctcttgaattgcacccaagaagaatgaggatacgtggaacattggagggtgagaagagtggagaagaattttattgagcaatgaaaacggctttcaagcagagagaggattcagggagaggggaataattcccccatgtggctggttctggggccctttatggactcagaatggggagtgcctgctgattggtttgtgagtatgcaaaaaagtttaaagggaaggcacaactcaaaggtgggcatgacagtgtagaaaaaccaatttggaaagggtaagtatatataaaaataggtgaagggtggggaccagttagaggaaagcatcccaaatgggaagacaaattcttaatccagtcctaggatttaacctgtagcttggttttcaggctttaaactgtcttcgacttggaggtggggtttcgtcggagaccctcccctgtctttctaggcatttgtctgcctctatcaaaaccatcttggatgctttaagaccctccaagcagggaattgctacactggctgacacacccatagctgatttttagcttagcaacttccaaaatggaaagatgaaatcgaaaacaatctggatttcccttaaacatattctggatcccaccctgaatataccaaaaaactgtcatcgatgacaaatgttcagcctatgcagacttgtacactaacaacctgattttgcccagcacttagggaagatgggcttcttactgatttatgccccagccctcacctttatccctgcccctccatcatgtattatgacttgctaataatgccatttcagagcaggcaagttgccttgtgctttcacccaggtgctggagtcagcctgcctgggattgcacccatctttgcctcttaagtaaccatgtgatgttggacaactgacttgagtcctttaaaagccttggcttcctcatctggaaagtgaggttaataatagtatctactttgttagaaagatggtcaggattgaatgagataatccatgtaaatcccgtagcatggtgcctggcatgtggtttctacacagtacacagtagcagctgttgttgatgttgttgttcttgaaggtgagatttctcatcagccagttgtttggattataaaagattagtaaaatgtttaataagttataagaaaagagccctgaataaagggtatgggaagggttgcagcttgtgagttaccatgagatggtggaaggaggttatctgaaattgaatgaaaaattgtagcatcagatgtgtttgggtgtggttaataatacacgtggtggtgaactgaggtagatggtagaagtttgagggtgtacattttgaatcttcccacatggctcatttcagccagttacagttttctgtgttcacctagtatttcttacagacaaaaatcatgaaaaagtaaatgcaaaatttcaacatgttcgaattgtttcttagtatatcggtggctttggaatgcattttcattctcaaaacaagctttatagcagaactgaagatatttaattcaggttctgtgggggtttcttagtagttagccacttgcatgatacccgttgagaatgggacaaattgatactatgctcaggaatgatagtatgccttgctttattttggcatgtgtaaaattgaaaccagaacaccaaatttttcttctttagaagtatgtatttgataaccaagtaaactgtattcattatagaaaaacaatacacaaatgttttaaaaaatagagccataatcctgggaataaccactttttaaaaagcttgacatatatccttctagattattttcgagtatgaatgttagcatttggagttacattttgttttgactgctttttagatttgtgccctaattttgacagttgctcactgtaaattatttttagttgttttcaaagcaatatttatgatataaaaagatctaattatttgctttgaactcctttttggtgtgtacctggatgttaatacttataactttaaaaaaatctcagcgtgaattcagaattataagcttagtattggttgcattctattttggaagacctatagagagctgtccaccctcctacaccactactaatatcctgtccttgccatgtgacgtactgaagccacaaggggaaagagccccatgaagctctgtctccctctcttctccccagcacaacacacacatacacacttaggcatgtttgtctttctttgtctctgctcttttcttgtgtctgtacttgtctgtcagtcggcctgtctctcccttactggagccattcatcatgccctcctcattcagggacagagtgtgctttctctgggctggtgccagatcctggagagaggagcgctttgaaaactcaacttggactcctcagcagaccacattgcagttgtgctcagcatctggccaccactttgtccacttaatatagggtccctaaccccacctataatttgcccacttctcttctgatctgggagcaaacacttttttagagctagatgcccagtttaaaatcctgtgaaaaataagagctcagtgaaaggataaggggagtccaactcaactacaataaatttggtttttccttcttgctttcttgtggggggaaagccagatgctgtccttttcacagagtaagttaccagtccgtgataattcagtagcatgacaagaatttgagctggcacttttcagccagaatctcagttacttacacacactacacacacacaatctgtttcaagttttaatgaatgaaaaattcacatgatagattgtcattcttagtttttaaatagtttttattgttattgaagtagaaaatagacttttttgggatattatcgatacatcagcagacttttaacttaagaagctttgaaccttgatttttctagtggaattccatattaagagttaataggcaagaaaagaagattttaaccaaagaaaacggggaggatggacagtgatgggaatggaaaattgaaaggacaagcttaaagttacagtcagttctgctatagcacaacatgcattcctaaaaaattactgcacaatgcaaaattacgcaacaaaaaccacatgaggcttattgggaaaacagggttatggcacaacactcaaagacctcatcagtgacacacacagaaaaacataggaacctaatgaaaagggtagcacagtcttacaaatgttaaatggtaaaaaaatacataaatactagaataaacatggcagttaccttgaaaagacctggcatttgcttgtggaaggcgtgggaagggttgcagcttgactgtgaagtcatggaaggaggttatctgaaattggatgaaaaactgtagcatcagctgtgtttgggtgtggttaataacacccatggtggtgaactgaggtagatggtggaagtttgaggggttgtgcattttgtgttttcctacgtggctcatttcagccaggtatagttttctgtgttcacctggtatttcttacagacaaaaatcatgaaaaagcgaatgcaaaatttcagtatgttcaaattgtttcttagtatatcggtggctttggaatgcatttgcattctcaaaacaagcttcatagcagaactgagggtatttaattcgattgagaattttatctaatcatttgatcttcaaagaaaatacatcacacatttgctctgagacacctgcttgagaattctgatacctagagtgtacttcttaaaagtcagagttctagttgagggttttctctgtcttcttcatatcacagacatgctgttcctttagtgcactgtttcagggggtacacaaggtgatttttgtagataaacacggatgaatattttaatgttcagtttatataataagcttattgaacttactgtttcacagatactattgttttggaaaaaaatctatctcagctgagggtagaggtgccctgcttcactctggggcccatctggaaatggattagggggtggtttcaggttgtctttggcagacgggcactactggtgaagaagcagtaggagagtaggaatgctaaccatcctgaaatcctgtatgaagaattgtcctgtctgaaataccaatgatgtccccatgagagactggctagtattagagtaaggaggaggagatgatagaattgataaagtaaattaaaatgttgagttttaaaaaaatagtattttatgtagctttggtaagaacgatgaaaatagtttgcagttgatgaaaatttggaaaacactaattcaagacaagtagtagtggtgagcttcatttgacaaaccctttagtgccttgtagcaggcagtattctcagtgccatgcacatgataacttactcagctgtggttaatggttcttgaggcattagcctggtctactgtagtgtctcaaccgtggctgcacagtagaatcagacagggaaacttgtcaaaaatctggatgcctagtccacaccccaaacgaattaactcagtctctgagggagggacctatgcatcagtgtttttaaagctccttacgttattccagtgggtagccaaggttgacagccactggtctagggccttccaaaatcactccttttcacaagaaaagctttactagtcatgcagaagttaattgaagacctctgtcccatgccttacagagaaagacaatggagacatggcccacagaagctgtatcgtctaaggcaggtgacaaaactgcaaacacatgtttacaatcctggctgacaagtgctgatgcttaaaagtatgttcagagtgtttgggatcataaaagagagaaaaactaaatttaaaaacatcttcagatgccaaatttggaaaactgccgaactgaatttattttagttttttattccttatacacagctttcattttggggtgaacaaaaagcaaaaggcacttataaatcactatcaatttaaccttcctaacttgattgtagcctttgtgtagttgagttggagaatagaaatttgaattttgtctgtagatagctaggataataattttgtcctgatgtggaacacacagttaagtactttataagccatcattgaagtaatgcccttccaggaataagtcaccacagttttaccaagaagctcaggactgctataagaagatctttggaaataaaccattgaagtcttacttgtggtcattgatcatcatgtgcttaatgttttaaatacttatatagctcctgtattgtgataaggcagtgttggatcacatgcattttaaaacttagagttaagcaaatgtgtaattttaaattaattaattaaaggcagccactaaggtactcaagcggataaagttaccaaatgatttacttgtttctgatggtaacattcttcaacagctcttgatttatattagtatggattaccttactctaagaaaacctgattctccagtggatagatttattttcagctaaacctttgtagtctgtacttaaccatgaattacttcctggtttaaaaaacaggcgtagctatttgtggtatttttgtcttgcgcctttggcatcttagcggtgtgaaccggagctatgccatctgtagtcaagtgagattattaaaaaagggggggtgggaagtgaaatgattcactggaaaatttcagcacagattcttagggaacgataagataaccctagaaacattcttatttggtgtcatctgctggtgggtagtgacagggaaaaaaaagaaggtacaacttgtttcttaagattttgctattttgaaaatcagagaggtgcggtgttagaaaggaagaaagaattgcttgcagtgtcatttagcagagctctgcagatgaatgaataattttcctctctcttaatgcaagttggagccaatgaggttcatttttagcacgcaaaacccaaaaggcaatattctcatgtttacgatggttgtctaatttcctgatgggtgtatgtgataaaactctttatgctgagatacttcagaaagagaaggacccgttcctagaatgctaagtaagtctgtggggcctagatgagccatttctgaagtctgctgagtttaacataccttcacttaacgacacgtgttttaacctgaatatattgatttcagggaattcttccagaattacatttgagattcgcctaaaacatgatgtctttttttctttgctttcgttttcagaaagaagacatagctcatccagcaagccgcctttggccgttcctcccacttcagtattttccttcttcccttctctgtccaaaagcaaaggaggcagtgcaagtggaagcaaccgttcttccagtggaggtgttcttagcgcatcctcatcaagttccaagttgttgaaatcacccaaagagaaactgcagctcagggggaacaccaggccaatgcatcccattcagcaaagtagagttccccatggtagaatgtgagtatggccaagagggtttttaaagcttacctgctggaaatgaaactgtgtacactagtggcatgtgagagtgcctgtgagtaatataaaagagagtctacttggggaagaattcaaatgtatgttgtattgtttcttgatgtttccctgtcatgtcataggaaacttttcagagtagtaatagcagtgataataaggttactaacatttattgatccattcttgtgtgctagctactgaaacctaactctatgtgtgtactatgtcacttatcacaacaaccctatggaataggtactgttactatcctcgttttccagatgaggagaaggaagcttcgtgaggtgggggagttttgtccaaaaaggcctcaagtcacataggcctggatttgtgtcccatttctgtcacttcttagctgtaggggtttgggcaaggcactgtttctgtctaagaataacagccactatgctgggttattgagaatattttagttaatatatgtctagcacctggcatagtgtctggccataggggacggttaacaaatggatactggcactcctgctactgctgctgtggataatagtaatgataaaaagatgcagagattcccagatgctgctgtagaatttttgggggtctacggagcaaatagggaagcagtgcttcctcccttcagccttaggttcacatcacagcagtgatgagggaagactgaaggaagttcacacctgccaggcatggctttggcaagtttccatggtcactcagtagattgacaggtttcttgaggtcacgtgagggagcagccacgcactccaataggaacatgcttcgccttgtcatggcatccctcagcctggtgacggatggcttttcttgggccagcctgcttttggagggtatagcacacatcgtaggtccaagatccggtaacctggttaatctcagggtagggtccagcacctgctgctgcataaggaccttgccagctgggagaggatgtgacatcttgcagtctctctactgctgtcaggctattccaggtacagttgtttggggctgtttgtcctggttgctaagcccccagcccctgttcttctgtcagaagtacagtacagcaagcttggtttttgttccgggagcagtctgaaagccacaaacggtgccagtgtagtgtgtaagtcactggccagcttaacagctgttagagcactgactccactgaacaaagtttatacaacctcattgattcaaatcttctttacttagagctaggcctttagataggaaccaggccagttgttagcttcctaccagtattttcagttttaccaagcaaaatgatagtgtcagtaagattccaagattcatatctttgttaatggcacaggtattccctaagctcctgtcatagaaacatttttcaaggactggagaattaccactttagtgacacaacatatatttattaaacactagtctcccttattgacagaagcaaagaacctcttcttggagatatgttatttagcatgtttgagttctcataagtctttagtgacatttattggaaatatttgctcactcagaagtttactttgttttgatgaatcctttcgtacaaatggcagtcctcaaaagatattctccaagggttctgcaaatagtctttgtttcttttagaccttctcatgttttgcttcttatagaaattgcattgcattgggtatcaggtctgagtttcccattgcctcatgtgtaaaattttttgaaatgatgaaagaccaggcaaatttgatggtccactgagggttttgcctcaccagaagggcttatagacttaatcagtatgaaccttactaacaaaactcataaggagccttccaagaggctggccctgtgcagcgcttgggtaggcccaggctctatcctcatccctctggctcaccattcacctgggggctgctgaggcactcaggcactggttttctcacttcctcctgtgacagcatgacaccctctgtgaaagtggaaaagattcatccgaaaatggatggcacactactgaaatctgcggtggggccaacctgtcctgctactgtgagttccttagtcaagcctggccttaactgcccctcaataccaaagccaaccttgccttcacctggacagattctgaatggcaaagggcttcctgcaccgcccactctggaaaagaaacctgaagacaattccaataataggaaatttttaaataagagattatcaggtaacttcaaattttctttcttcataatgcttctctatatattaaatgggcattcgtggggagcaaatcaactgcaatctagaattcctatttttaaaactggtcaacttcagctttaggaggaagttccttagttaatatgtttgttcttttcactcttgggttttaaagagcatgagtgtgtgtgtgtgtgtgtgtgtgtgtgtgtgtgtgtcatgtaaaagtagctttctagtggtgtatttctgaaggaagtaatacagacttaaacaatatcttttctaccatctgatggcagtagtcaccccctgtcttagtgatgttgctgctttgttgcagcactcacacgttgtatattttttattttattgataatgtggcttttattccagctataatttatctaactgttgatttcttctattttcttgcttaaaaaatacatggaggagagtttgtcaggccacatgtaatgcctgtgttcttttgacagaaagagagtttgatcctgacatccactgtggggttattgatctcgacaccaagaagccctgcacccggtctttgacatgcaaggtaggtggactcctgaaagtcaagtcgaccatcctgataaacatgggtgactgggatgtaccacactactcccacagtctctctaacccagagaagatgctctgtggattgttgtgaattgtgtaggtgaaggaataacttggttctgttgaagaaagcctcagattgacaaaatgtgaagtgcgttgttataaattataatcttgacagaggttttgtttctaatgagcagtgttgtatccacaggaatagtgttctctcccagtctgttatttttaaaaacttttaatatttccatataggctacccttgactgtgctttaaattatactggcttaaagcaagtgcagaaatttcccttgcgtgtgtatgaacatttaaaaaatgtgtcacccatggtcttaaattttaaagaaccactttttaaaaaatctgtgattttgaaatatccctgttttctagtttaaaaaaaaaatactgcaagccaggcatgcctgtaagtcccagctagtggggaggctgaggcagaaggattgcttgagcctaggagtttgagtccagcctggagaacattacgagacccatctcttttaagagaaaaaaaaaactagataaaatatattaataatttatatacaagctaagaaaatgtaatggtcttcctttttgctctggggtcttccttcttttaaaatgccagtatgctaataaggtatatttgctgaaaagtgtgggttattgatgtggggtggcttcaggtcatcagtgaacacctctacataaatgagcttgtatgttgatgtgcatttctctggagggtgtccccagctaccccccagataggttcaagaagcattcagagtcactgctttgaagtatgtaattttaaaaccttagagggaggaagtaaaaatgataaaagttagcattttcttctaaaaattaataaaattgttagtgttttactttaaattttattaaagtgtatttgaataaaggacttcaggccctgtcccatgccccagccagtggaggcatgttacagtcttctggagtgggaaatttttaagtggttcttactttaagcttctaatttaattttagtatatagattttgtcttacaacagtggttcagaacctttttggggaaaagggttggtcaagagtacctttaaatatctcatttttaaaaaaaaaaaaccacggtccatcttccgagaataaaatagtgcatacacatacacattctgaatttttctatcttggattaatggacacccccaccccaagcccatccttggatttctaggttaaaaactctcataaaacaaactgctttttttttgtatagggtactaattggacacacagtggtgtagtggtggtggtgtatgaagatagccacctgagttctgtagaattatgtcagtttcagctgtccctaagagaatgtgtgaaagcatgcctcagccctgtccacatcatgatcacaacttgccattctccttctgcgctcttcctgcctacctgactctcagtaacatggatttctcagtaatacagtacctgtgggcaatgaggtttgcttttttcaaacccaagatgttctttttcagtcatttacaaagcgtggcagggaaccacacctttaagtgtgcaagacagtattgttgactgtgaaagaatattatacagcagatgtctagaacttgttcatcttgctataactgaaactttatgctcattgattagtaactccttatttcgctctcccttcagccgctggcagccaccactctagttgttgattctgtgagtttgattatagatctcatataagtggaatcatgcggtgtttagtcattatgtgactgggttatttatcttagtataatgtcttcaagcttacctcatacttgttgtagcatattgcagaatttccttctttttaagggctgaatagtattccagtgtatgtatatactatgttgtcttcatccagtcacctgttgacagacatttatattgtttctacatcttgtctattataaataatacttcagtgaacataggagttctaatagctctttgagattctgatttcagttattttggataactacccagaagtgaggttgccaaaagttttttttcaactcaaaatcttcaaggagcttgactggcattcttcctgtgcctttattgctaggtggagtgactttgaatgggtctgcatttttctcacatcttccttttcaaatgatatatgctccccttgtcgtccttctttaagggtgtcattactctccgtggcattgggctaagcctgtcattgcattaataagtcttgagacccagcttgtcatgagatcagcatagaactggcagaaaatgcagcatccaccaggcctgcccttttacaggatgacttgactttttttcattgttttgtcagttcttttccttttccttgccttcacgttggtctgaatctattaagcttggtagggctaaacatgcctgcatgtccctaccctgagtgtttcccaagttgctgccaggtctcttctgtcttagacttagaacgttatctgttctcttcaccgtcaggggatttgctgctgttcattcccattactcattctctgttgtctgtctcccatcctcactgcccctcctcacttcttcatctgtctaatatcccgtcgaaagtcctctgtgccttccacgcggagagatttgtgactcctgtagcctttgtccattcactcattgtagaactttttattacgtacatctgtgagcacaggcctcactctttctaggtcgcagggaataaagggtttagcacaataaccacgtgttccctatgcttgtggtgcttacagtctaatgaaagagatggagagtattaatcaccaaaataactgtaaaattaccactgatgagttataaaaagatgagaggactacattatgaaagcctgcaaaaatgaagtttttccagggaaggctttcttgccataggaacattgggctgaaatcaatgtgatgatttatctgggcttgagagggatgggagaggtaggagaggtggaggaaacaatatgtgtgaaggctctgtgacaggggcagagcaaattccttagaaccttaaagccagccaggtggctgaacagaaagagggaagaagaggtacgcgggaccaaaggagcagggagcagtaagcaagggtcttagagtgtgcagggttccggagcctagttatgcagtcagtctttatcctgtgagccttgggcaacccctatcggatttctgtttggaatgttcttcacagctcagtggaaaccctacttaggcttcaaactgagctgggaaaatgtatctgcctgctttcttcatttggctgtactgtgctaggcaccgggaacattcaagctgaggagaggtttatacatctgcttggagagacaggcaggtggaccagtaatattatatgttcattcgttctttcaacacacgttggagggccattatttttataaactttttgtttgaagcatttgagcgtcaggtactcttctagatgctggtacaacacaaacaaaacaaagttcctggtctttaggttactttcttagggatattttccatattaaagaaaatcaagtaaaaatgtaaaaagctaaacacatttgtctgtgccaggttagattatttaggtagacatagtttgcagtgtgtctcgtaaggaggtgggttgtgttattcaaccgaaaatggtagttagaagcataattccctttttaagtccctaaagttgtaccaactatgccaatacatttgtattatgtgtaggggcatgcacacacacatttacaatattttgtaatataaaagaaggaaacgtgggtgaattcatttatgtttatggatatgtgattaggggccactgtagctcatgtaaactcatccactcctcaggattagcatctccttgcatttttacagactgagatctcagcagtatggaatggtcaggtttaacttgagtgattggactcaactgccaataagatttgcccaactctgaccagttcacacttgtacattcaactttatcttctgttagcaatagtattaggcttatttgttttgttttgttttaatgccagtaactatgaaatgcgtttggactacagacacattttcttatacgatttgcttcaaccacaggtgtgtgtattggttgccttaagacaaacactgccataatttgacttttctttttcctctgtgtatccatttcttaattctgaaattagacattgtctgaagacccaggggtgttgtccatcccatttccttaatttccatagccagtgtctatctatagggattactttgtctcccttcctgttcatagcatttcttctcagcctcatcttctgtccagtgctccttggctgtggcagtctgtctgcagaatgctttgggccactttctatttttgcatggcattttcattggaatagagggacgcaattgtgtttaatttttattctgtggaagttactaaaagaacactttctgatacatgttttatggaatgattgtttcttccctttacattaacattcaaaattttaaatggtccaaagagggtttttctaatggagtcaataagagcccccaaaaccaaattgctgttgtgtcacaaaacatgagtacttgttatatagcgctaatggttgctcttagttacataccaggtgtcaccgctcacatatcttttttcttctgatggaaataacatttccagattcttctgcatttagagcctagaacgtatgcttctagtctagctagggagaaaataatgggctcttaaggtttttagcttatcaaatgctgagtagcctttcactatgcttatggtctagattgcttatttattgggagtggtgttttgggatataaggcagaccaaaaattattaatgagattcctcagtttctgtatttttttggtccacagacacattccttaacccagcgcagggctgtccagggtagaagaaaacgatttgatgtgttattagccgagcacaaaaacaaaaccagggaaaaggaattgattcgccatccggactctcagcaaccaccgcagcctctcagggacccgcatcccgcccctcctagaacgtcacaggagccgcaccaaaaccctcacggagtgattccttccgaatcaaagccttttgtagctagtaaacctaaacctcacacccccagtcttccaaggtaagccaggccctccaactctttctcccaccttcagagatgagacttgcagatactgtaaaatttcagtatggtcatgctgttgagaaacatatctcaggctcactgtggagatagttttttaaggagttttactatgaaaaaaaaaaaggaaaggttgagttcagtaagtttcaaccagggctcctcttggttgtaaatgcaagcagcaaaataaagctagagttatctgctctatacttgctgaacatcaagtgtctcaactctgttgagcaggcagaaattgggtccttcctgcgggttagtgacaggaactcttcacatggctttggcagcagtttccctttcatttgtctttatatagcagtgggaattcttgctagggacaagccgtttagcctgagtttttacagcatccgtttatcaatgtgttttcattcattcatttggggctttggcccaagcatgtattagcactttagtagcagagtaaacagtggatcagagtgttttaatgagaacttatacacatacctcagagacagtgatggtggaatatgtgtgtgtttgtgcttacatactgaaccaagttgaagtaaagactgtacctagtttccagagggaagggaaagagaaaggcatagagaaagaggggcttcagtgttggccgttcatttattgggagcaagagcttctgctgaggaatgtgccagtcctcggctgctattgcttaccatttcaccctcacatgtctgatctttaaaatggttgcataaaggtggaagcatctccctcgtggaaacccaggtgcctgttagagcctgtcccaacgtgagctttgtggtttctgtgcagtatgctggaggagccatcagaggaggctcctcagagtgtggtcaggacctggccagagatttcctccccaagtcctttctttggtcatcttctcattgaagtttttgcatctagaaaaatgtaagcttaattccagagaccattgtaggtgtaggaaaaatacattactgcccttgagtaagaggctgtaggctatccacataaagtggtaataccaccttattcttgtatcacctcctgtctctcctaggttatcttagagcattttgcaaattacagtcagccctctgtatccatgggtttcacatccgtggtttacaccaattgcagattgaaactatttggggaaagaaaaattgtgtcgtactgaacatgtataggctttttttttttcttgtctcagtattccctaaacaatacattacatagcatttacattgtattaggtactaaaataatctagagattatttaaagtatacgggaggatgcgcataggttatatgcaaatactacaccattttatatcaggccactttgtacatttgtggatttgcagattttgctatccccaggaggtcctggcctcaattccccatggataccgagggacaactatgtttcatttattgtgtaggtaaaccaaatccagttgaaatttgaagaggaatcaaagaattctgttaaattccacatgtatttccccttctttgggggagaatagaagagggatctgaaccacccaaatggcaatagaaaggattcgttctaagttaccttgattgtatctggcaaacagctgaacttaacatcctgcagttcaggagagaggttcctttactcccaagccacctggatcagcatctgttttcccccagtgctagaggtggaacccaggcctctgctaggttgttttggacacactgttgtatctcagttaaggtggctgattcccaggtgtgtgatctgatccgtgctgcactttctactcaccaaggcctccaggctgccctgctcagcaaggtgggagtgcccccattgaccctcctccagtccatgaatctccacaccctcccctgcctgccactgagccagcttctcggttatccagtgaggagggcgaaggcgatgacaaagaagagtctgttgaaaaactggactgtcattattcaggtcatcatcctcagccagcatctgtaagttccacgtccacccccgcgttgaccctccccacacagcatggacagggcactgcaggggggcgcgccagggatcttggcatgcccgtatgtgtgggacgcggtcaaggtgtgagagaagttcaaaacagggtgccccagaggcagcacacactctgtacgggggacatctcgtgcttttttccctttctcttccatgacgctcagggctaggcattgtcactctcatgcttcacagcctccggtactcagaggcagttctgtctttcctgattagctcctttcctgaaggatctagaaccctgactgggcatgccagtgtgggagtcagcaagcacgcggctatgttttctcttgcagttttgcacatttgggagccggcagataggaagaggctattacgtgtttgactccaggtggaatcgacttcgctgcgccctcaacctcatggtggagaagcatctgaatgcacagctatggaagtgagtgcctgttgttcttgggagaggagctgactttacacagtgctgcattgtcttttatttcctgtgagactgatgttatgaagatatgcttatctaaacaaaactggcctttggccctgagaagaaggtgccttgtcattcattcattcatttacccctttaccccacaactacatattgttgtgggtgctggcattcaaagcagaaggactcccacatgtatggagctcacagtctagttgggattgggtaaggggagaaaaaaactagtctacagaagaataaggagatgatagcttgtcctaagtgacagaatggaaacaataacaatcagcaagacttagtgagagccaactatacaccaaacaacttaaatatacttaacattcacaattctctgtcaggtgaccatgattataccctccccccacccctggttttttttttgttttgtttttttaatagatgacaaaactgagatacagtgtcatgcagcaagttagtggtagggccaggaattgaacctagaggtaacatgttttcaagtaaagagctgaaaatacagaggccagagggattcagggaaagcctctctgaagaaagaggcagtccttgaactgagaaggatggatgagaaacagcagtcactgggacagtagggaggagtgggttctgggcagaaggaagcagctgtgtcaaggtcttgagtcagaaaagacagtttgttgaagaaatagcaagaaattgagcacagtacaaggatgaggtccaagaaaccagcaggggccaggtgacactgaaattgtttcagtgttgaaggttttaggtagaggagccatgtgctccagtttgcaatttaagacaccttgtgtgatattatgtacctaatgcttcccaaacaggattttaagtggaagaagagttccatggccaaaaaggtttaactcagcctttcctgtaaaaaaaaaaaaaggttctgttttttactgcagaacttgtcagagccttaatgggcactgtgctttgtaactcttgaagcagggaatgtcacgtcatgtataatgtggaacatgtcccaagctcttttcacctcggaaccttttttaggggaacatcttggagaactagtattcggtgggagtgactttggtgaatagtaagctttgctaaagtgactgtccagtaatccccaggccatcccagatcctctgtttgggcattatttactagtgcctccttaaatggactctgccagtacattcatttgactccctgccttggtttcctaataaagtcagacgctagtcggaggccttggattgtctgcaacccaaagaaccatctccatgatcattagcaggacttacatccgtttccttagaacaccagattcagagcactgttactctgcttttctttttcatatttctttctggttcttgctggataagaggttcttctttatgaaggaacattgtccctggctagacacagaatcaggggactgggtttgggggttctgcaggggtttttccacaccagaactccctaagatacatgaaatctcaacttcatatttcttcagactacccattgggagttggaaagcacactgagctcatgaaactatgggtttaatgtactcctaagagtttagaatggatttctgaatgttttatccacattatgttggtatgtggctcatgaccaacagtttgggcaaagatagtttcagttcctagtggcttgtatagtgagactttcctcttgatgtgaactttttaaaaagtaagatcataaggtcgactctgctgtctactctgttctgtctgaaggctgcctacttgcttccggggagaaggaaaccaaccctttccattagcatgaccattggtttttaaaaagtctacagcaacaagggacgtgttgctcagtaatgagctgacacataggcttggggcagaggggaacttggtgcatgttgcctcccaacataggagtgctggcggccttttcaggcagcccctgagattttctctggggagctcagcacttctcatccagagaactattctcacctggcatctttgaagccctcaaggaaactttcaaagtgatccaggtcccaccctaccggctcagcccaaaatccttccttacagggttattgtggtaaaattgaaggtaagtgaggtgggaattgagtatgaaatgagtaaacttcagtttgtggagtctcaggccagtggtgaaattagaccagcactttctctgcagcatggccataacctgaaaggccactgcccaccttctatgatttctgtgaactacttgtcctctgttgatttgggaccagtatcccatattccctaagaaggggctgggatggttttcaaagatttttgttggtgtattttttttttttttttttttttactttttgaaatggtaatacaatcactgggcttaaaaaaggaaaaccaaggctgaggcaggagaatggggtgaacccgggaggcagagcttgcagtgagccgagatcgcgccactgcactccagcctgggggtgacagagcgagactccgtctcaaaaaaaaaaaaagaaaaacgagtataaagaggcatacattgaaaaccgagtcctcctgtctcctacatgcttgttttccacctagcccccacagacatttttattattttttatgtatctctacatagtttatttatgcaaacacaagtcagtatgagtacatattgttactttgcctctttatacacaaaagagtaattaactacttaaaagagcttttctaagaggaacttgtgattgcctcccggagagatccacatccttccctgctctagaaggcttttcctttcctcgagatttggttccaggcagcctggtctttaggccctggcttcctgagccacctggtggtcatgagaagccactgctcccagtgagcagtagggcctggacttcatttagagcagggcttctgaatgctccagaatcacccaggggccttgttgccatgcagcttctgatgcatcattctagggtggggcccaggaactcagttttcctaaccaacctctcaggtaattaatgacactgcctgccaccctcctctatgagtagtgcggggagagagagcctagcctctcaatcttggctccacattagaatcccctggaaagatttagaaatgactgatgtctgtccccactccccgcagagacgctggtgtaatcgttatggatgtggcttaagctccacaggtgactgtaatgtgcaacagctggagttgagaagcactaacatcaggccagagctgtacccttgaatggggttttgggtttttttgtttgttttgttttgtttttgaaacagggcctcactcagtcaccgaggctggagtgcagtagtgtgatttcagctcactgtgacctccacctccccggttcaagcgattctcctgcctcagccttctaagtagctgggattacaggtgcacaccaccatgcccggctaatttttgtatttttagtagagatggggtttcaccatgttggccaggctggtctcaaactcctgacctcaagtgatccaccagcctcagcctcccaaagtgctgggattacagttgtgagccactgcgcctggccgaatgggatttttaaagcatttgcaaatacttgcagtcattaattcattttattaataacagtagtctttaaaagcatctggaaatcacctgggcagcagtctaggccagctctctcactggggtagtggccaggtcagccagggctaccccttaagtcaggatcaaggcaatcctggcacttgccttccagtcaggcctttttgtcttctgccacctcggtttaaattctgccaaagaagtttttgaaattttgttactgtcacatttaagattcagagctaaaataaaaggagaccctccctggtttgaatttagatggtttccgcatcccctaataaataccttgcccacacattcttaacagaatccattgttacaacaccatgctgaatatcccttgatactgtggggctttattcccttgttcaggccaatagttatgacctagcagttgctgttaattagctgcacccttccttttctctcattcattcctgacttctctcgacatttattcagtgccttctgtgtttcctgcactgtgctgaacactaggaccacaacggtaattaagctggggatgactctctctgcagaggatttggtgattagcaatccgacacttaaaggatgagcagaagctggggtattgggtcatggcattttctcagaatataaggaagtacagtggctggaagcagggaacgggggcgttgggggtgggaggtggagctagaggctggggcaatagcagcggggagttgcacacatacagttctgtaagaactgtaccaggaaggcattaaagaatttgaaggagagaggtgacaggattggctttgtagttcagagtgattgctttgatgtggatggtttctctttgtcacaagcaaagagggtggtgccatctgaaagtctctgtgaatggctgtggtcagtgtcattcactgtcctctaatttttttcaggaaaatcccaccagtgcccagtaccacctcacccatctccacacgtattcctcaccggacaaactctgtgccgacatcacaatgtggagtcagctatctggcagcagccaccgtctctacatccccagtcctgctctcatctacctgcatctccccaaatagcaaatcggtaccagctcatggaaccacactaaatgcacagcctgctgcttcaggggcgatggatcctgtgtgcagtatgcaatccagacaagtgtcctcttcatcctcatccccttccacgccctctggcctttcctcggttccttcctcccccatgtccaggaaacctcagaaattgaaatccagcaaatctttgaggcccaaggagtcttctggtaacagcactaactgtcaaaatgccagtagcagtaccagtggcggctcaggaaagaaacgcaaaaacagttccccactgttggttcactcttcctcctcctcttcctcctcctcctcttcttctcattccatggagtcttttaggaaaaactgtgtggctcactctgggcctccctacccctcaacggtaacatcttcccatagcatcggcctcaactgtgtgacgaataaagcaaatgcggtgaacgtccggcatgaccagtcagggaggggcccccccaccgggagccctgctgaatccatcaagaggatgagtgtgatggtgaacagcagtgattctactctttctcttgggccattcattcaccagtccaatgaactgcctgtcaactcccacggcagtttttcccactcacacactcctctagacaaactcataggaaagaaaagaaagtgctcacccagctcgagcagcatcaacaacagcagcagcaaacccacaaaggttgccaaagtgccagccgtgaacaatgtccacatgaaacacacaggcaccatcccaggggcacaaggactgatgaacagttccctccttcatcaggtaggaaatggactgtgagccccatgggaatgcccatttcttctcccttaagatcttttgtcagctcagaaatgtgtttggttgggttggttggttggtttgtaaacagatattcagcttcatggtgtcttcttaaaaaaaaaaaaaaaaaaaaaaaaggttcacggccgtatgaaggtaaaacaggctcttctgccagaatttctggtgcctttggaagatgttcttcagtaaagaaactacagtaatgcatttttagtagagctgcagaaagcatcggttgtgacagcaaaatcataattggagggtagcccctttatgaaatagccagtaatgtgttatcccagtgctgtgaagtgtgtgccattcgaggctttaaggaaggaagcaggcattgtttcctggatagtggttctttagtatgttccgctgaggaaagctgcgctaaaatcaaactgatctagaaaggggtgatttaagatttaaaatgaggctgggtgcagcggctcacgcctataatcccagcactttgggaagctgaagcaggtagatcacttgaggtcaggagttcaagaccagcctggccaacatggtaaaacccccgtctctactaaaaatacgaaaattagctgggtgtggtggtgcacgcctgtaatcccagctactcaggaggtggaggcaggagaactgcttgaacacgggaggcggaagttgcagtgagccaagatcgcgccactgcactccatccggcctatgagactatgtctcaaaaaaaaaagagcatttattatttttccctctcaaaagaatttcagatattctggttaaatctcaccccatattttctcttcccgtttttgagggaggcaggaaaacaggattcagtatgggcatagcagaagactgaaatctcattccaagctcatagttaaaaagaagtctgcatatgaacccatcagtagagaagtggctaagtggttgtgggattcataattaaccatgactttctctcttaggctgtatttttgtctcgtcccagctcttctgcctgttactgacctcacctgtagctgtttcttccagcttcctttgctctaacttccagctcatctctcatcttgttattttattcatcaggatatctcctcaccttgcttacgaacaggaatttcagcaacatcaccccagagccctgacttaaaatgtgaggctctttttcatgattttttttccccttcctcgtcttcagaacttaactcaaatgccagccgggttaggactttttcagaaaataccaagaagtttcttagtattttcgtagtgtgatataattttcctctaatatttgggtgaattaacacccattgccaaaggtatggggaaaatatttgtgaatttaactagctgcatgcattatgggttattatatgttgtttggcattctgatcatgggattcctggacaaatgagaagtgtgcttttccttcttggtttgtagttactcattacagtttataagcataacagtccaatataaacacagaagacatggtgtgccgattcttcaacgcaccgtctttgagagagacatgatccccacggaaggggcattccattgtgctgtaatgtccatctcacatctgtattagtgagcacactgtcttcatttagacaggagtgtagatcttaatgcccacaagtaacaaaaaggacagaaggggggggggccaggtggggcacagcagagattgacagtgcctactagaaattggggggacatggagcagctgcttccagacatttgttaccagttttaaagagaggctgcagatctggacttgcatgtgaaatttagttgagatatatgtgtgtgtgtatatatatatgtatacacacacgtatacacacacacttttttttctcttcttaaatctggtatagcctatgtatctgtgggccatctttggctcatgacctgccattttgccacctttgatttttaccatgtagtggcactatgtcttactagaacaacacagacagcctaactttgggctttttccttaaaatcagttaaaatcagtttccacttaagtttgtgtttgagagagattttctctgtgcagaggaatactttttattatgctacacaaatcctggggcaagagcaggggtgcttgcttagagatcaaaggatcattgaaccccaagaagtattgcacatttttatgtctttgttcatttatcgtatagctttcataagaatctcaaagggactcgtgaccccaaaatgctttaaagaatgctgctgttacaaaagtagggacctctacttgctgttccttgtggagctgccattaaaacaaaaataactgggctagttgaagttttctaaacaaggggatgaagagtgggacatgctgggaagcctaggagatgatggggttgggtaggcacccccaagagtctgttcatggcctgtgccaccaaagatgtaaaagcccactgtgaatgccagagtttcctcctccccagcatgggcactgccttgagtgcgaactgtcacacctgtgtgtgctagcccttgaccttgttcccttctcagttaacaacctggaataccttcaaggacacaaaagcactggaataccttcaaggacacaaaatcagtaaataaaaccaaaaggcaaacataagagccttttctctaagttagaaacccaggcctgcaactcttctagccagttggctagaagtgaatctttgcaatgattgtgcccagtagtagtgaaggcatttgaaagctaagaacaaaatctatagctgactgttcctggtgtcactcagtcaatggagactttagtagcgtgcagcctttggaatattcttgtttagaatcaatagagtgcagtgtacaaacgcttacttaccatttcattatttccccaccccctcttttttgaaagccaaaggcacgtccctgacagctgaaaatagcacggggaggaataatgcggacacttttgaggacaagttacacctccactcagcactctggactccacgatgcctttgagtctgttttcccaacctcctgtgggcctcaagggtagaaacctgccgggctgttgttttaacgaggatttccctgaagctatgtctctagcagtgagtactcataaaggacactggatcaagttcagccaccgaattgcttttatcagtgttaaagtggtctgaactgcttgctaccaatctgtgagaagtttttgtttttgttttgttttttaacttgcagtatatcacagagccactcttcaagtagattggctgggcaaaagaatgttttggcaagagcgttactgtagacctttctccctccttccttttactaccatttttttttaacactgtcatctgtaggtcactctccagcagttaggcaccttaactggagaccagaaaccttccagagaacacagggctgcatcccgagcaaccctctgaagaagggaattaggctttagattttgatagcaatgttccaggaatgaaatatagatgttagcccaagacaccatgacaaaatagcccagccttttgagagtaatttgggaaaagaagctgtcagaagtttctaacttacaaactggtttgaaatttttgatgcccagacagcaagtataaatcattttggaggcttacttttcatgatacaaaagcaattctgtgtgatttttttttttaagaagaaagaaaatgcaagctagttttgagaaaggaaggccaaattgggtcgggggagggtgggagtgaggaagttaaaatcactatagggagaaaaaacttttttcaagatttccaaagagatgaaattttcttaatccttttaagttttcatagtaaacagtatggcagattgggttggttgtcctacctggtctatttttaaaagtcaccttttaaagtgacattattagatacacttaaatgtttccaaggcactctctacattacccttgtttttctctttggatactgtcctgggactaagtgtagatttctgcttcaagcacttctggcattgtgtgtttttgtatgcactccccttcatgccacttcagatgtttatttggatgtggttggggacgagagcagacaccaaggaaagggagttggagagaatgtaagtcctgacctgaaggtcttttgtgatgcatgtataggattgccctgacacacaccctcctttcttgggattataccagccatcttcctgagagttttggagccctctaggatattttttctagtaccccaccccccacccctaaagaaagaccttaatatgttaaaacagcattgcttggagaaggtgtcattgaattccgggacgagccggagcctttaaatgggtgcttccaccactacaggctcctgacacgagtaacaggcactgttgcttagaagaacacacgaagttgccgaacacagggtaaaatttccaaggcgctgatcgttgccctggccagggcctgatgagagccagtcagtacattctttttttcctacagttcttgggtttcaaacttcagtttcagggaatttcaagtcaacaacaggtagaatgaataaacttggttaccagcctaataatgtgaattgctacagaattattcttattatgtaagaaaacaaaaactttatgcagatactttagctataaattgatgtaaaatactgatttttttaaaggaaggagagaacagtatcttgttcaattattatgcaatcaatcagtaaatgtttttaaaatgatactacaggagagcttagtaaggagagggcatggatgggccagtttggcatagttgggagaaatcagtctggtttccatcccagtcggggaagagagaggtgagagggaatcagaacgtacctagttgattccttggtgacaagtgcaatggggtatgggtagaatttattttcagagccaagaggacttgatggttataaataaagttgcctttagcaatggaatttacagatcgatcatgttgttccgaaagatgtgaataggatccacaataacaagttgattcagactaatgtagatatttagattagcaagtattgaacatttgatttcttagactgaggttttaaatgaatttcattatttctcccggtaatacacagagcatcgggattaggaaattagccattttggattctgtctgccacaaacagacctattctaaacagtgctattaaattttagactgttgttcaaatattttattttctcctaaactactttttatggtgatgaataattaagaccatttaaaacacgggagtacaagtatttttttgaattaaattaacttgcaaaaaccaaatttgcagtggttgggttgtttctagacagactttggtatcaatttaaaaccaagataatttttatattctttccaatagaatttcatgacaactcctgcagttttcttaacctacaaaaaaaaaaaaaaagtgctgcaatgatgaacaaagaattatacaaaacctacttttgtatctttattttggaatttcttgttctattataaatatggaagtatccctatttcagaagacatattttgttaaaaatgaattgtacatatttaaatatgtatttttgcacaggtctttttttctgatatcctgttttggtacaattgagatcatctagtatttatttattaattaataaaagtaaatacctttttataatttgaagtggttcactgccaagccaatagttctagaacctgcctcctttacagttttaagggatgcctctgttctgtgaaaagtctttgtcccttttagtgtctcgggagtggattcatacagatgaagtgggcattgcttcttcctggttgcctggtttcccgatagactacatgtaactaagtgacacactgcttttcttttgttagtattttatgtgtgggagtatgtgactgcgtgtgtgtgtgcctgtgcgtgtgtgtgtatactcagcacatgtatgttactatgtgatgtggtttaaaactaatggaaaaaactgaaagtgcctgaaactagttttaagcttagacagaatctctttaaaaagacttgaatgttcagttgaacttttggagtttgctttttccacctaaatattgtttctaaaattttaggggcggagttgaaaaccaccaatgctggtaattttataaggtattttaaaattaagacctcttggttcatagtaattcaattggtgatggattgcctggtggcaccaagggttacagatctttttgtcagccagcaacttacacgatgtgtccgttttgttattcactcatgaaatacaatttaaaatatttaaaatattttgtattccaaaaatataatacaaagaagtacctctgagaacattgaaaaaaatgtataatttgaaaaatgtaacttataagggcagctgtcttcctgcaagagttctgttgccaaggaatttcttaatgtcgctcattctgtccagggggtttggggcgattgggctttgaaaaaatattcttaaaagtttgtttagcagaaaataatcacttttacattttgtgcaaaacattttacattttcagataatttaaatgagcactacatactgtcagtgtgaatgtagggccttgaaagcattttgcttttttttttttttttttttttttgagcttggttataaaagcaatctcctgtgttaaaaacgtgtgaatagtttgataatttgtacacataatcaagagcatctcagctggactttgtgttggctgctgtatagaacatgaacaaatgtcaagggatagaaaattactttggatatttaaaagagaagaaatatatagtctatttgttttgtaacaagtttctgtaaataaaataatttatactatttataagaaaaggttgtgctttgctttataagaaattagcttgtggaacaaacatgttactaaacgggcaataaaattaggacttctcaataaataaggttggctgcatgaaatattgtacgtttctgcctcgttgtgatactaaaccctttcagtctactctgacttttcatcacttttggcatggaacacccttgtgaagccccttcaatttagccttcctcttatataagctaaatacttctaaggcctggggatgtttccatctgggggcacaaagctttgctttggataaattagtaactgtgtaaacagtgaacattactgtattctggccttgcatgtttgtgaaagaaacgagggagttgatggattgagaaacacattctatttgtacttaggtgcaaatttgatgacatgtagttttggtttaagataagctttttatccagacccggtctaatctcttcctttcttttacatacctcccttactggcaatacaagtgcattttagtattatttggaacacagcataatcatttacctctagaaatccagacatttttactgtttgcaaataaaccattctgataaattatttttgttgcttaaaataagaggaggaaccgctgtgtgttagcaagaatgtccatacctgatatgaaagagtcatgttggcttcagttcctactgccctgtggacttcccattccctccttacttgagtcaaccatccactcagtactttccacaaatctaataatgaggtgctctctgtaggtaaatcctttcactatggcttgtcctcaaacctcccaagaaaaggttcaactgctcaatctcttaacctttttaattccattcccttgcaggtatcccggccctgcataacaagatgatcccaactcaaggaaaggggtttagcagtgttggatcttggcgtatgtgggatttaaccaggcagaaaggcagacaagagtaagattctaggcagagagagcaaatgcgtcgagcatgggtatgaacatgtgagggatagagaataattctgcaggaagtttgctggatggaagggccttatagggttagaaaagctggtgtcagattgtcaaggactttgaatgtcatggggcttctcttccaggaacacatgggatcaggcttagattaacccaaatgtaattgtcagagcccagagatatttcatggtccagtcctagcactgtgcagctgccaaaagtcaaagccattcaaatctgtactgaaaactgtggaaaagcaaaggagcacttaagtctctttccccatgtcttgcattctcactctcttttgcttcaaagatctgtctttacctgcccctgtccccagtcctaacaaaaagcactcccctaaatcaactcttaagttcctctcccttctcactcctttcttagtctcctctttctgtaagaagttcttgctcctgttgttaatggaagttaattaaagtagtatttcaccttgtaaggctgtaattcttggcacttgttatcctcattttctacatccaaagaccatggaccagaatatctcttaggaggtaagggagagtgaggctatcagccaaagaaaaagtctccagggggaaggggagaatcacttataatttaatactttgtggaaaaaacatctctgccacctatggccctccaataacaatggaagacagaatcaacaggtgagaaccttgggacaaaaataagttacaaagctgttgtaatccaggtaagagctattaagtttccaaacgaaggctgactgtgaggataagtgatactgatttcagaaatct

SEQ ID NO: 111 - DNA, 7242 bp, Homo sapiens
gaaaaagggtgaaagagaaacttggcgacctcccggaggagttcgcgaagcgaccaggagcgtgttgccatcgtcctcacccggcacccaattccaccacagagtcgggatttcgtcggtgatcgtgatggggtgcttttatttttctctttgattttcaaaaaatgtctatgtgactgtccctatcttaaggggaagttgaaagtgggggcgggggtgctcaatgagaaacgttgccttgtgtgtagttgtttggagcacactgcaaattatattggcatctctttccaaaagtcactttgattcaacttcgatagctttctcgtaaatggcacgtttaggtggtgagaggtggatgaggaaacaggcaccagtgcagctgatttgacctccagtgggatagatacgattagcaccaggatcgtgtctcattttgaacccagatctgaacagaattaagacgaacgagctttcacaattgcagcagatgaagatccattggtaaattgatcaggatttttggcctaccctccaaagaaaaggagcggaaagaatgtcggagcgggccgcggatgacgtcaggggggagccgcgccgcgcggcggcggcggcgggcggagcagcggccgcggccgcccggcagcagcagcagcagcagcagcagcagcagccgccgcctccgcagccccagcggcagcagcacccgccaccgccgccacggcgcacacggccggaggacggcgggcccggcgccgcctccacctcggccgccgcaatggcgacggtcggggagcgcaggcctctgcccagtcctgaagtgatgctgggacagtcgtggaatctgtgggttgaggcttccaaacttcctgggaaggacgggacagaattggacgaaagtttcaaggagtttgggaaaaaccgcgaagtcatggggctctgtcgggaagacatgccaatatttggtttctgtccagcccatgatgatttctacttggtggtgtgtaacgactgtaatcaggttgtcaaaccgcaggcatttcaatcacattatgaaagaagacatagctcatccagcaagccgcctttggccgttcctcccacttcagtattttccttcttcccttctctgtccaaaagcaaaggaggcagtgcaagtggaagcaaccgttcttccagtggaggtgttcttagcgcatcctcatcaagttccaagttgttgaaatcacccaaagagaaactgcagctcagggggaacaccaggccaatgcatcccattcagcaaagtagagttccccatggtagaatcatgacaccctctgtgaaagtggaaaagattcatccgaaaatggatggcacactactgaaatctgcggtggggccaacctgtcctgctactgtgagttccttagtcaagcctggccttaactgcccctcaataccaaagccaaccttgccttcacctggacagattctgaatggcaaagggcttcctgcaccgcccactctggaaaagaaacctgaagacaattccaataataggaaatttttaaataagagattatcagaaagagagtttgatcctgacatccactgtggggttattgatctcgacaccaagaagccctgcacccggtctttgacatgcaagacacattccttaacccagcgcagggctgtccagggtagaagaaaacgatttgatgtgttattagccgagcacaaaaacaaaaccagggaaaaggaattgattcgccatccggactctcagcaaccaccgcagcctctcagggacccgcatcccgcccctcctagaacgtcacaggagccgcaccaaaaccctcacggagtgattccttccgaatcaaagccttttgtagctagtaaacctaaacctcacacccccagtcttccaaggcctccaggctgccctgctcagcaaggtgggagtgcccccattgaccctcctccagtccatgaatctccacaccctcccctgcctgccactgagccagcttctcggttatccagtgaggagggcgaaggcgatgacaaagaagagtctgttgaaaaactggactgtcattattcaggtcatcatcctcagccagcatctttttgcacatttgggagccggcagataggaagaggctattacgtgtttgactccaggtggaatcgacttcgctgcgccctcaacctcatggtggagaagcatctgaatgcacagctatggaagaaaatcccaccagtgcccagtaccacctcacccatctccacacgtattcctcaccggacaaactctgtgccgacatcacaatgtggagtcagctatctggcagcagccaccgtctctacatccccagtcctgctctcatctacctgcatctccccaaatagcaaatcggtaccagctcatggaaccacactaaatgcacagcctgctgcttcaggggcgatggatcctgtgtgcagtatgcaatccagacaagtgtcctcttcatcctcatccccttccacgccctctggcctttcctcggttccttcctcccccatgtccaggaaacctcagaaattgaaatccagcaaatctttgaggcccaaggagtcttctggtaacagcactaactgtcaaaatgccagtagcagtaccagtggcggctcaggaaagaaacgcaaaaacagttccccactgttggttcactcttcctcctcctcttcctcctcctcctcttcttctcattccatggagtcttttaggaaaaactgtgtggctcactctgggcctccctacccctcaacggtaacatcttcccatagcatcggcctcaactgtgtgacgaataaagcaaatgcggtgaacgtccggcatgaccagtcagggaggggcccccccaccgggagccctgctgaatccatcaagaggatgagtgtgatggtgaacagcagtgattctactctttctcttgggccattcattcaccagtccaatgaactgcctgtcaactcccacggcagtttttcccactcacacactcctctagacaaactcataggaaagaaaagaaagtgctcacccagctcgagcagcatcaacaacagcagcagcaaacccacaaaggttgccaaagtgccagccgtgaacaatgtccacatgaaacacacaggcaccatcccaggggcacaaggactgatgaacagttccctccttcatcagccaaaggcacgtccctgacagctgaaaatagcacggggaggaataatgcggacacttttgaggacaagttacacctccactcagcactctggactccacgatgcctttgagtctgttttcccaacctcctgtgggcctcaagggtagaaacctgccgggctgttgttttaacgaggatttccctgaagctatgtctctagcagtgagtactcataaaggacactggatcaagttcagccaccgaattgcttttatcagtgttaaagtggtctgaactgcttgctaccaatctgtgagaagtttttgtttttgttttgttttttaacttgcagtatatcacagagccactcttcaagtagattggctgggcaaaagaatgttttggcaagagcgttactgtagacctttctccctccttccttttactaccatttttttttaacactgtcatctgtaggtcactctccagcagttaggcaccttaactggagaccagaaaccttccagagaacacagggctgcatcccgagcaaccctctgaagaagggaattaggctttagattttgatagcaatgttccaggaatgaaatatagatgttagcccaagacaccatgacaaaatagcccagccttttgagagtaatttgggaaaagaagctgtcagaagtttctaacttacaaactggtttgaaatttttgatgcccagacagcaagtataaatcattttggaggcttacttttcatgatacaaaagcaattctgtgtgatttttttttttaagaagaaagaaaatgcaagctagttttgagaaaggaaggccaaattgggtcgggggagggtgggagtgaggaagttaaaatcactatagggagaaaaaacttttttcaagatttccaaagagatgaaattttcttaatccttttaagttttcatagtaaacagtatggcagattgggttggttgtcctacctggtctatttttaaaagtcaccttttaaagtgacattattagatacacttaaatgtttccaaggcactctctacattacccttgtttttctctttggatactgtcctgggactaagtgtagatttctgcttcaagcacttctggcattgtgtgtttttgtatgcactccccttcatgccacttcagatgtttatttggatgtggttggggacgagagcagacaccaaggaaagggagttggagagaatgtaagtcctgacctgaaggtcttttgtgatgcatgtataggattgccctgacacacaccctcctttcttgggattataccagccatcttcctgagagttttggagccctctaggatattttttctagtaccccaccccccacccctaaagaaagaccttaatatgttaaaacagcattgcttggagaaggtgtcattgaattccgggacgagccggagcctttaaatgggtgcttccaccactacaggctcctgacacgagtaacaggcactgttgcttagaagaacacacgaagttgccgaacacagggtaaaatttccaaggcgctgatcgttgccctggccagggcctgatgagagccagtcagtacattctttttttcctacagttcttgggtttcaaacttcagtttcagggaatttcaagtcaacaacaggtagaatgaataaacttggttaccagcctaataatgtgaattgctacagaattattcttattatgtaagaaaacaaaaactttatgcagatactttagctataaattgatgtaaaatactgatttttttaaaggaaggagagaacagtatcttgttcaattattatgcaatcaatcagtaaatgtttttaaaatgatactacaggagagcttagtaaggagagggcatggatgggccagtttggcatagttgggagaaatcagtctggtttccatcccagtcggggaagagagaggtgagagggaatcagaacgtacctagttgattccttggtgacaagtgcaatggggtatgggtagaatttattttcagagccaagaggacttgatggttataaataaagttgcctttagcaatggaatttacagatcgatcatgttgttccgaaagatgtgaataggatccacaataacaagttgattcagactaatgtagatatttagattagcaagtattgaacatttgatttcttagactgaggttttaaatgaatttcattatttctcccggtaatacacagagcatcgggattaggaaattagccattttggattctgtctgccacaaacagacctattctaaacagtgctattaaattttagactgttgttcaaatattttattttctcctaaactactttttatggtgatgaataattaagaccatttaaaacacgggagtacaagtatttttttgaattaaattaacttgcaaaaaccaaatttgcagtggttgggttgtttctagacagactttggtatcaatttaaaaccaagataatttttatattctttccaatagaatttcatgacaactcctgcagttttcttaacctacaaaaaaaaaaaaaaagtgctgcaatgatgaacaaagaattatacaaaacctacttttgtatctttattttggaatttcttgttctattataaatatggaagtatccctatttcagaagacatattttgttaaaaatgaattgtacatatttaaatatgtatttttgcacaggtctttttttctgatatcctgttttggtacaattgagatcatctagtatttatttattaattaataaaagtaaatacctttttataatttgaagtggttcactgccaagccaatagttctagaacctgcctcctttacagttttaagggatgcctctgttctgtgaaaagtctttgtcccttttagtgtctcgggagtggattcatacagatgaagtgggcattgcttcttcctggttgcctggtttcccgatagactacatgtaactaagtgacacactgcttttcttttgttagtattttatgtgtgggagtatgtgactgcgtgtgtgtgtgcctgtgcgtgtgtgtgtatactcagcacatgtatgttactatgtgatgtggtttaaaactaatggaaaaaactgaaagtgcctgaaactagttttaagcttagacagaatctctttaaaaagacttgaatgttcagttgaacttttggagtttgctttttccacctaaatattgtttctaaaattttaggggcggagttgaaaaccaccaatgctggtaattttataaggtattttaaaattaagacctcttggttcatagtaattcaattggtgatggattgcctggtggcaccaagggttacagatctttttgtcagccagcaacttacacgatgtgtccgttttgttattcactcatgaaatacaatttaaaatatttaaaatattttgtattccaaaaatataatacaaagaagtacctctgagaacattgaaaaaaatgtataatttgaaaaatgtaacttataagggcagctgtcttcctgcaagagttctgttgccaaggaatttcttaatgtcgctcattctgtccagggggtttggggcgattgggctttgaaaaaatattcttaaaagtttgtttagcagaaaataatcacttttacattttgtgcaaaacattttacattttcagataatttaaatgagcactacatactgtcagtgtgaatgtagggccttgaaagcattttgcttttttttttttttttttttttttgagcttggttataaaagcaatctcctgtgttaaaaacgtgtgaatagtttgataatttgtacacataatcaagagcatctcagctggactttgtgttggctgctgtatagaacatgaacaaatgtcaagggatagaaaattactttggatatttaaaagagaagaaatatatagtctatttgttttgtaacaagtttctgtaaataaaataatttatactatttataagaaaaaaaaaaaaaaaaaaa

SEQ ID NO: 112 - DNA, 306000 bp, Homo sapiens
acctaaggctattcctagagacatgcattcttatctgcaccaaaggtacctgaggcagtaatgtttaatagccccaactggaaaaaaaacagatacccatcaacaagatgatggataaacaaattgtggcatattctcttgatgaaatactatacagcagtgaaagtgaatgaatcacagccatgtgtgacaacaaacaggtgaatttttctaaaattcgaaacagattaggatgtatgaatcttgttttttttgtttgtttgtttttgttttgttttgttttgtttgacagagtctcactttgttgcccaggctggagggcagtggtttgatcttggctcactgcaacatcctggactcaagggatcttcccatctcagcctcctaagtagctgggactaggttcacatcaccatgcctggttaatttttattttaaaaaaggtttttggagagacagggtcttgctatattgcccaggcttgtctcaaacccctggcctcaagcaatcctcatgctctgcctcccaaagtgctgggattacaggcgcagacaccgtgccctgccagatgaatcttaaagacataatgttgaaccgaagaaacaagaaactgtagaatatatactatatgattattccatttatataaaagcccaaaagaagcaaagtaaaattgtattggttaggaacgcataataaggtagtcaaactttttttaaaaaagcaagatatgaataccataaagtcaggtagcgattattgctggaataaggggctgtgtaagcgtgttggcaaagggggttctgcagaggtggtgatgttccatttctagccctagacttgatttcatgagtgttcatttcagaccaatttcttaactccgtacctttatgttttatgcatttttctttgtgcttattgaatttcaccacacaaaaagcagaatgggaagtaatcaaagtggttctggagagacgtgagtatcaagcaaactataccacccagaacccctatccagccaactaggacctggttaattatttcctcctgggagttcagacttgtcacctctggggtctccaaggtagaataaacctttaattccaacttgcaggagtccttgtgatttgaaacgttcacagaagtaaccccaaaccactctctccactttcaaaaatggtcttttgctaaacagagcaaatttgtttagagactgacgaatcgcacctctagacacaaatccccttctcttttctgtcttttaagtttttttcctgcctccatcctgccttctccttgcaagatgctggggagcgtccggctgtctgcaaccgaaatggaacggggtggaaaacaggctttcctcccaggggaggaggaagcaccccaattcccccctccctgcctcccaaccatgcgacgctcccctctctcccccacaaactccgctgagcccggtacccccgcgcctccacgagcctccacgattggtcgcgggccctcatgtgtcgacactctgggtgggtccttctactgttaaactcatcaattgctccccttttccgtttgctggccagtggttcagacctttgcgcccatttttttttcctctttaccttcttctacccgcaaccctccacaccagtcttattttagcaaaacctagagaaggaggaggtggagggatttggagggtggagaggcattgccgcatccaggggcagctattgagtggctaagcggagggcgcatacctctctctctctctcttttccccctgttgggaattttcaggatttcactgctgcaatttaaccccaagatgaggcaccattgagcgaaacgctgtgcgcacatacacactcacacttcctccgggagcagaagaggcagccgttggtgattcaggaagaaaaaaaatttttttttttttttttaaacctggaccctgcggtgtgaagactccttaggaaccctctggagcgtcttactccccttccctcctctttcccttccctttcatcttctttgtttttattttattttatttttggagctacagatctttcagcatttttaaggtctaggaactccagcaaaacagaagggcacttaattttttttttttttttttttgccctccccacccagacctgggtttcgtctttctttatttttaaatatatatatatttttttattttttattttttatttttttttaatgggccgagcgcactccttttgcaagatgccagcctgacccggacctcggaggaatttgaagcttccactgcgtcccggggggggcgtcctttgcaaaccgttcgcgtcttaaagggggtgtgcgttgggtggattttttttttttaactgtctctttttttttttttccggagtgggtggactggggattgcctggattccttcctcggttattttttgcctcgcttctctctcccctcccccctcctccccgggcccccgcgccccgcccccgcaccctcctcccgcccctccttctccggggtcagccaggaagatgtcccgagctgctatccccggctcggcccgggcagccgccttctgagcccccgacccgaggcgccgagccgccgccgcccgatgggctgggccgtggagcgtctccgcagtcgtagctccagccgccgcgctcccagccccggcagcctcagcatcagcggcggcggcggcggcggcggcgtcttccgcatcgttcgccgcagcgtaacccggagccctttgctctttgcagaatggcccgcttcggagacgagatgccggcccgctacgggggaggaggctccggggcagccgccggggtggtcgtgggcagcggaggcgggcgaggagccgggggcagccggcagggcgggcagcccggggcgcaaaggatgtacaagcagtcaatggcgcagagagcgcggaccatggcactctacaaccccatccccgtccgacagaactgcctcacggttaaccggtctctcttcctcttcagcgaagacaacgtggtgagaaaatacgccaaaaagatcaccgaatggccatatccttttgcccgaaccccagcagcagctgcgcctccccctcctccctccgcctcccctcttccaggctgggagagagacccgggggttgatgggaggtggggaggaggggggtcttccaggggctgggagagggggcaccgggaggagtgtgaaagaatctctccaccccgagctgggttgagctaccctggaggcttgggaatgggtttgtggggggctggggggtgggcagcggagagtggatccttcccaaggaccgactctagaatgagatctggggcctggggtcgtgcaggagccttggtgggggctttcgagccaagtccggagggtttggagttctacggagtgagcttggagcgggctcgggcctgggcgcttctggccagggcaggggaactatgggggccttggttgggttttcttggccgtcgctcactggagtccacgcaggggaagctggacagcctctccactactgctttccccaaggtggggggccgccgcacttttagggcagggcgcttgggggctcccagggctaagagcaagagggagtccatgtggccttcacactgagaagccagcactggccgaagtgagtaccccagggtgggccgctgttcctatctggagaggatagtgatgggctggggggcgcttatgtttccctcatgtgtgcaggtcccattgcctttaaccgctgattggggaacctcatcatctttgggggtgtcgagaaagagatcccacttgctttatctgggcccctggcctgggaagacctgatctggacactttcagtaagaaagacagggcaacagcaaatgaggtggtgggtccattttagagcaccatgtccagcttttcctaccccgagtagccgagagggaacaccaggagaatcagcacccatgtggacatcttaggtaggtaaatgccttttaaatttttttttttttaatcaaagatccagaggaaaaaggtgaagcccacattttcttctgtggagatgctatcaaaatgcagatcttctgtgtttctttaaatccctgcctgcttgaaataaaccttgaggagggcttaacatctatcgagatgtaggcaggcaagggtgggtaattagtcgggctttctagcagttatctaagcatgacccagattccaggaggggggacacaccctgctgcccaggctggctggccactgtgccatgcccagatgtgccgcttctccgcacagttccaaccagctgccctctgtgtaaaaatgaacgggctggatgggtccctggggctcagcgatgagtcccctatcccttttgtatgtggttttgcagttatagactaaacggggctgggccctgtgtggtctccgggggttgctgtttgaggagcatggcgggtggtagagggactcacttcaggggggttcaaaatcgagcctggcgcttggatcctgggtgctgggattgcaacagagggcactgaggttttggagtgtgtgagtggtctactttgagggtggggaaaattaagaagttcagcagaggtgcttttgaggggagcatacctctaactacgatgccatctccgttggtgcccaaagcaggtgccaggtctttgcttcctaagtttcagactcttaaagaggctggttcttaaggttagcaattcctcaccatcccaggcccattgaagtgctcaggggtggcttgattactctgcctatcaacagagtgaggagtgggagtgccttgcaggaggacagggtattcatgggtgcacacccagttagctccaggagtgagagggctttgctcggctgacaggtttcctcattgaaaatggctttagatcgccttctggagcctggatttggagacttctaagaggaaaggaaggaggtggggagcccttctgctgtgtccttagcttacctctgtccagcctgaatcctgcagattggagggctgttgggggagagggggattgcagtggcccctcggaagggggaatcgtgggagagggaggcaggtgaattgcgagtgttgcttgccacttcatctattctctggccagctcgcccggggctttcttgctcttatgatgagtttgtgcattatgctctctgcagactgtttttgttctctttgacccgaggtaacaaacacattatacagccctactctggaagggaaaactccccacctcacaatctgtcatcgagctgggtcatccaggactgagctttctctgtcctggatggagcggagggcggtggcggggtgggtgggagggttggagatgagaggggatggacagagacctggggagggaggtagtgaataaaagaattcaggccagtgtaaagagaaagacacgtggaatgtcagagtcacgataccagggcagaacattctactttttaatctaaatatttctgccattaaaaaaaaatgtttcagcatatcctgagagtgaaaaaaaaagtgtgtaggtacttaaataaagtctaatatatgtacaggcaagtacatatattcagatgcatagatttttacaaaatgaacacacccacgtatccagcacccaggtcccgatcagtgccctggaagtccccctccccataccgcctcctagttgctcccccaacaagggtaccgctcacctgacttctaaggttcattttgcctcttttaaacatgtaaatggagtcacacagtacgttcttttgccactggcttcttttgctcacatctgtgtatgtgactctactacaatctatccattctactgttgatgggcatttgtgtcatttctgtttgtgccactgggaacattcttgtgtcttctattatttttttcccacagttctcttagataggagtggaatcgcccctgctactttttgatgcatgtgttgtgggatgtgtatttggaaatggtgttgactaagggttgcaggtcgatatggaaagcaggttcctccctgtcttgtttaagagaagtgagtgaatgatccatgaacttgtcggtatgctcacagggcctaagagtgctacttccaaatgtaaattctggcatggtacactggtgaaggatgcagtcttgctttctccacactcggggcaatttgtcactatgatttcttcctctttcatccctcagtgggtcaaacttgaagccatcaatgacaattaagaatcctcatttatttcattttttcccctcttcctaagtgaggaaacccaaatggaagtctttgatgttcaaatttacattgccgtgtttttctcatgccaggcagcaagccgtcttgaccacacaccttggtttcatgttttcattgactggaattgtgattcaaatagggccatgagggtctctgatgattgccgaagagctcagatctgtcagctcaaaaaggagcatctgtcagccttcctagagttccctccccacttaatgccactcactccttctaccaagtgccaaggtgaatgtcatctttccagccctccctgtgccaccaggtctcccactgaacatgatgtagaaactcaggccatcggaggaacactggaagcaggtcagtgtattatcacgcacagttgcctgaattacacgtagaattccagcttttcatccggtttgcagaaatcttaacaagacacctaaagtcacattgacatcaggtgacatcactttgacatctgtggacattggctgattggcactcctctcatttttttttttttttttttttttaagaaaagctctctaaagagaaactttctgcatgagaagcgctgggagacatgggagcaggttatcagactcttggcctgtcctgagagatagaatgttctagaaggtactgccgtagagggcaggatggtgtcacttacgtgatccttgtactagaccggcttggctggtatttccagaggagcaaaattctgcgaagtaaaatttagcacggcttttccaatgggagtattttcaaaaagggtgcaatttcttatccacaattccccaatccaaaaagctccaaaaaccaaaagacgagctcatatagaggtaaaacctaacctgaactgacttcagtttgaagtcttaatttacagttttcattcattctacttggtgtgcatttgagtatgttttgcagcagaaatgttagatgtgcttgatgatgaggtgctgcttcagctcctgactgttaggtctgcattgtagtcctgtcaaactttcaggtgtatggaagttgtcttgttaacaggatggttctggtccagcaggatttgggtggggtctgggattctgcttttctagctagcttctagggattccccatgtggtaagttcatgggctagggttggagtatccaggttagatcatagagacatcttgttatcatttttcttttccttaaaaatcaggtttataggggccgggtctggtggttcacgcctataatcccagcactttgggaggctgaggccggtggatcatgaggtcaggagttcgagaccagcctggccaacatggtgaaaccccgtctctactaaaaatacaaaaattagccaggcgtggtattgtgcgtctataatcccagctactcgggaggctggcaggagaatcatttgaacctgggaggcagaggttgcagtgagccgagattgcaccactgtacttttttttgagactctgtctcaaaaaaaaaatagatttattgatgtataatttatttgtagcaaaattcacccttttgacatactggtctgcaagctttgacaaatggatgtagttgtggccaccacccaaatcaagatatgggacagtttcatcaaccctaaaatacccccacagtgcccctcttgagtcagcaccccacttctccagccccttcaaccactgatctgttctccatccctacagctttgccttttgccgaaggtcatataaatgtaatttcacagtatatagccttttgaatgtggattcttttactcagactttgagattcattcatgctgttgcctgtgacagtagcgccttcctttttggtgttgagcaggattccatgatatggatggaccagagtttgcttcccagccgaaggacattgggatgcttccagtttcaatgattatgaatagagctgctataaacattggcttatgggttttagtgggaacatttcatttcatacatttcatttctcttgggtaaattaacccaggagtgagattgctgagttgtgtggtaggtgtatgtttaattttataagaggctctcaaactgttttcctaagtggttgtaccattttacattcccatctttgcaatgcgtctaaaagccctgagttctgaattccaaagcacgtctggcctcgatggcttaggattaaggatgtggatctatggaaaggagtggaagtaatagtgttaaatcccggtcagagaaataagaaagattaaggatgtcattcaaagctatgtgcctgcactagagagagagaaagaaggggttctcttgggtggggttccacccctccctggtagttctaccattccccaggaaaaagtcaagctctgaggctgtgagacccatgatctttaccctgttcttcaccactgcaaccccagtgtgtgggacaaagcaggcgtcctataaacgtttgctgagcaaatgagaaaaggtacctgtcttcacccattaactaaattgtataacatctatctgatctacccttgtgccaacgttttaggattttgatgggttttagttgcagggggttgagagactgtccatgagattatcagaccaatgaaagtttctgaaatgttagtgcttgagtagattggatgcagcggccccttgagaatgaagtctttcttcagggacttggagtgggaggcatctgttgggtgcgtagggcttatgcttccccctccctgtttcccccccagtagcaagcacacatatacactttctcagcaataaaaagcaccgccgggaaggtggactccatccagaaatgatcagagcctaagagccgtgcagtaacgcatttccgagaatgccagctcagctcctgagaaaagggccggatgggatggtgcctgctctgaaagagggcagagaggagagggaaaacactccggactctgggtcagactggcccaggttcacattattcaccagccatgttatcttgggcaccagagcctatttcttgacatgcatgatgaggatattccttctagtagcatctcccttggagggctctcaggagattaaatggggtcgtgcgtgaaaaatggccagcacagtctccagcacagagaaaaaccccaaaacgccagagccgtaatactatggagtcatttaggttccagtgttctttttttggaaaccggccagaaaagaggctttctgggtgggaatgggagcgaagtgcccccccccaccaccccctgcgactggtcagtgtggattgattaacctgatcgtggcgctctttaaagccacctttggacattttgcattctccgttctctctggaagctttcaggggaaaaaaaattcgtggccacttgacccatttttctattcccttgagtctaaggtaaaaattaattctctttcctcctttggtccctccctctctctgtgggtgacaaggtgagggagttttaaagtatataattagcttccctcttccccttttgcactccctgtctcttcctttggggccggtcgagagtgcagcccaggatggccaccccaggtgtccactgcaaactccacagaaaaactttgctcaacttttggtttagaatttaggtacccccctccccttccaaactttggtcttctttctcctcactccctaaaaaaataggaaaaacaaggaacattcctggcgagggaaccatgagtgggcacagcaacttaggtttcaaaaaccactgggcctcagttcttatctgagtagggtgacccttcagccagggttgcctgggactatcctgggtttagcatctctggaaactcacagtcctgggcaaactgggacgctggtcaccctaatggtgagttcttaacacctgagagagaagaatggtgcaagagatggtgccgttgaccaagaaagggggagagtcagttacttattccctctgaaaagccaagactttttattggaatgaatgcagcttttagaagccgtctttaaggcagctaatacaagagagattccagctatgaagggaaatgcctgagttaagtccggatcaagttttgacatctcgcttcggtcagacacggctttatctgccgttcagactgggagcagccgtgagtcttccttaaaggtgcctgttgctcaggcggcacctgcagttagaaattagcagcctcccacccccagcccccaaataacaggattcaagagtcccctctctgaagccatgagggaaacccaacttagtcacccacttgccagtaaataatattcatgctgttaagttctgttctcattttaggcctatgtgtaaaaaatatatgtaattttaaactgatttttaaagtattttcatacgaacagcatttgcaggagggcgaagtctggatgttacctttttgtaaaagtggatggatttgtcttcaatgagactctggggcagacttaaaacttggcccgcagtggtgttacatggattctgatcttccagagtctgtcacgttcttttatctccatgatctttattatcttctttattgagaatgatgggcatggtgtgtgtgggtgggagggctatgctgaccatcactgcagtgaaatgtgttcgtggcatgttgtggcgtctgcataggaatgtgtctgtttgattaacagcacaagcagtggaggctgtaaggaggaaaagaggagggaaggtgatattggatggaggggagacatatagagcttgggaacagtccaccctggctgcaaatctcagctccagctcacagttgtggagcctcagtcttctcctctgtaaaacggggacagtagtcctatgtccgaggaattgtaagaaggttaaaagatactgtacccagaaagcacatggcatatataatcatcctgtgaagtagccaactcaatgaattttattttatttattttgagtcagagtctcactctgtcacccaggctggagtgcagtggcatgatcatggctcactatagcctcgacctcctaggctcaagcgatcctcctgccttagcctcccgagaagctgggactataggcatgcaccaccgtacccagctttaacaacataaatttatatatatatatatatatatatatatatatatatatatatatatatatatatatatattttttttttttttttttttttttttttttttttgagatggagtttcattcttgttgcccaggctggagtgcaatggcgcgatctcggctcactgcaacctccgcctcccgggttcaagcaggacgatgggcatttgggatgtttctagtttggggtgggggattgtttgtttgtttgctgttatgaacaatgctgctgtaaggaatcaataattttgaatgaatgaattcgaggtgttaattttagtctgtgtacttggaaatctagcttcacctagaatcagctgagattcatcagcatttatggcaggagctaagacatttcacagcttactcatcattttctctaagaggctgggtcaaccggttagctcttggtcctgcttgtattctgagagtcagaacctgtggtttagacactggcaattgatatggttgtagagaagcagcatggttgagttgagagcatggattctggagctaggtggctggggttcaaatcccagctctactagtcactggctgcgtgatcttgggcaagtcacttaagtgttctgtgcttcagtttcccagtctgtcccagtggtgattctaatagctccatggggatcctaatagctcctatctgggaggattaaatgagttaatacatctgatgtttagagtggtgcctgacacttaggaagcactatatgtgtttatacatggaagagtggatagatggatggacttatgtgggtggccatatttgggcttctctgatccactgctgagaatagtgtgtggcacacagtaggtgctgcataagtgttaatattctgctctttcttgccaagtctctcaactcccttgatctctgttatttttggcgtctgtgttgttaacccattcttctgaatgatcagctgaatcactgttgctccaatatataagccaaggagaacacaatcacaaggtctcattgattgtccatactagaattccatgattcctaggcccaagtaggattttccccacgtctcagcaatccttcttccatgtttctaatctttttctctcatttgttatgccccattgccagactctccaatctccccacagcttccccttcctctaactatactgtctctagtcttaccttctccctaagggcaccgtctttgaagacatcaaatacttcagagcaccaaatataggttagcttctctgagggccttacaaggacatggagtgtttgggtcttacacaaattggaatggtcagaaatgtttagagacttgagttgtctttgaaagagttgtcagaatgcaaatttttgacttgtggcctgtttctgatcacaacgcagtcttttaagttatggatcatagctggatgtttgtggtttagaggggatggaggcatcctctgcagttagtgttggatgtctgggtggatggatggatggatggatggatggatggatggatggatggatggttgaacagatgcatggatgagtggatggatggatggatgggatgaaggaaggaaggaaggatgggtgattggagggtaggtgggtggataagtagattggtagatgactcgatgggtgggtggacaaatggatgggtgaatggatgactggatggatgactggatggattggtgtatgagtgaatatatggctggatgaataaataggcagatgactagactggattgaggggtaaaaatatggatgactggatgggtggatgagtggatgatagatggttgaatgggtgggtggatgggtggatgttggatataagggtgtatggtagggtagctgtctatgtgtgggtctccctgatatttggtgttctgtttgacttgggaatgaccaagtctctccgcttaccaccttatttgtaccttttccagtatcaagtgaattttgcacacttttgtaaaaatcaataagattgtatgtttaggactttgggaggccgaggcaggcagatcacaaggtcaggagatagagaccatcctggctaacagggtgaagccccatctctactaaaaatacaaaaaattagccaggcgtggtggcgggcacctgtagtcccagctacctgggaggctgaggcaggagaatggcatgaacccgggaggtggagcttgcagtgagccaagatcatgccactgcactccagcttgggcgacagaacgagactccatctcaaaataaataaataaataaatattatatgcttaggttttacctatgtaattagaaagctccttgagggtaggggacagtgatttgccttcctcacatccccccaaagttcctgcactatatcatgcataagtatttaattgagtaatggtgaggaaagtaaacagtgttattgaacaaagattattaaaattctggaaacacctggttttgtttcagcactgggactgaaagtggaattccttggattttgctccattggtggataggatagcatgtggtggtggactggtagactctttctcttccaagcagattgggtaaatgccccagattcttacccactagtcagagattacagattactgattgatatggtttttctctgtgtccccacccaaatctcatctcaaattgtaatacccacatgtcatgggagggacctggtgaaggtgactggatcatgggggtgatttcccccatgctgttcttgtgatagtgagttctcatgagatctgatggttttaaacttgtgtgggcctctttcctctctctcctctcctgctgccatgtaagacgtgccttgctttccctttgccttctgccatgatttgtaagtttcctgaggcgtccccagccatgcagaactgtgagtcaattgaacctcttttctttataaattacttttatagcagtgtgaaaacggactaacacactgatgtagcaaggtcctttaaggccccatgtgatctggtccctgttttgtctttgatctcatctctttcattgtctaccttcctttcattgtctattctgtctcagccctgctgaccattttactcacacccatgtcatttgcattacatgacattccttctgttcagcataagctatttcctctgcctgcatcactgtttctccaggtctccccatggctaactccttctcttcatttaggtctcagcccaaaagttacctcctccaagaggcctatccttttcatttactgaacatctcatgtacaaaaaagaatataaaatatatgtatactctctcatccacaaaaaaatctctgaagacattttaatgtatttcatcccatacctttttatgcatgtaaacttttaggaacacatttccatgccactaggtatccttgaaaaaataagggccaccatgtatagttgcacaggttgtgcactgcacaaagatagcatgtcacatatcttaagtatcatggagcttgtatgtctactatttcagtaccccagctgataaaagcttaagtatcttgttctagcaagatgaagctattatgacaatttttgacagagaaaggggtgttttgtttaagttcacaatcagagaaatgggtgtcttgtttaatttcacaaccagagaaaggggtgtcttgtttaaattcatacagtggtgctgtatgggttggtggcaaccccagaaaagactgttgttaatatctgataatgttccactttatacgtgtattatattcatgtaacaatctctggctgtttgttttgccattataaataacagtgcagtaaacatctttgtgtgtgaatctctgtccaaggttctgatagttttctgaatgaaattcctgtctatatatggcactccaagcccataattgaaactctgctgttaccactttctttgaatctgtagaaggaattttgagaacaggtgactggtatattcaggatgttgatgacaaggaacagagaaagaacagttaaatggtttggaatttttcctgggctgcatgtaaagcagtgcttttgaactgggagcaatttttcccccaaggggacttttggcaatgtctggagacgtttttggttgtcacgaatgtagggggagggggcaagatgctactggcatctggctggtagaaaccagggatgcagttcagcatcttaaaatgcacaggacagcctttctcagtaaagaattatccagctccaaatgtcagtaataccaaggttgagaaatcttgatgtaatcgatgtcatgggtttcttcaagaggagtgggtggatttagggtttttgggtgacttaaatttaatttacagtttgtcttcctagctgggtgtctaagccagctttctgtgaactttagatcccacacaagaagcaacaggcttgctaccgacagattcgttgatgtaaatatagatgagtgtatagaaggaaatctcacccagagctggaaaatgttggaatgaaaactgcggcggcctccccttctctctccttccccttctgttgccctgtttgaaaatcgtgccttactttctttggtctcctggcatggtgaatgctgctggtatggactgtgtttctatatccccttgatccccacacccttaggaacgtacaggagagagaccctggagcatatcagcttagagatggaggggaatgggaaggagtgcgttcattcattcataaatgttgactgagcacctactgtatgctaggtgaatgggaggacgtgagggcagggaggtgacaaggttggcttattctgggctttgtgaactatggtgaggattttgtttttttccaaaggaaatggaataaccactccttttttccccccgatatacctaaactttttgattttcataacaaaaatgggcttccttttgtatatttgttttgagaccagccgtttttccaccaacactgatcacactgcagtgagcatcctggtagagaagtctttgcacacttctgtcactgtttccctaggacagattcctggaaatggtatggcaaggttgtatgtcaggcttttgggccaggttgcaagaaacaggaagtctgtgccctttcaaattccaaggtcccctttccctgacgacgtggcccaatcaggcttgccctcccttgattttacatcttcaccaatcagataagtgaaagtgaaatcctgttgtggtatcctgtgcatttctttggtgacttaagacatagagcattttccagatctctgtgggctgtttggatatcctttcctctgttttctcaggcacattctttaccgatgtctttgagggattgagcaagtttctgttgaaattgaggcatgtcatggctctgtgtggggcttgaggcagtccagtgtagtggagggagggaggctgtggagcctggctgcctaggttcaaataccaactctgcttatttccattcatatcattttaggcaaatcacttagccccctgggcctgcctttcctcatcagtaaaagtggtataacattagtgcctgcattgtggggtggttgtgaggaaagcagcactcaaaacagtacctgacacacagtgggtgccaaataagagtctgatgtattagtgttataggtatcggcctcctccctccccagtgcaatagtgtgtgtgcgcctctgtgtacctctgttggtgctgacaagccctttttaaaatttagaggtgaggtctcactctgtcccctaggctggagcacagtggtgcaatcatggctcactgcagcctcaaccgcctgggctcaagcaatcctcccagcttagcctcctgagtagttgggactatcggtgtgcaccaccacacctggcccttagacagcccctttatttcaaagcgaaatggcagccacaagatttagtgcaagctctccaagctttaggaccagctgcaactcctctaactgaccaaacaggatcccccatgtccccaacccccaaaacctgatgaaaagcaaacagaccattttccacattcatgacggaaaggcccttttcttggctcctgcccttgctcatgtcaggatttcactccatccctgataaagaggaagcaccatgtcccaggaggacatggaaactctctgctttgtggtgaatagttacagtaacagtagctcctctctgtggggagcttatgagcccctaagctttatagaactgccctggcagtttatgagaacttcatcccagcccccagagctcatggcacttatttttgcccccagtttgcagatgtgcacactgagactcagagagctaacactgcttgccaaggtcacacatctagcaaatggagaaactttatgagacaggtgaaggcacagcaaggataaaaacccagagggaaaaatactcaagttttctccgggaaaccatttgcattccagagaggttggtgtgcgagtgggcaagagatgtcgcgggacgatggttaagggacagagtctgagctcaactaggactaggtttcttcctttccttccttccttcctttcttccttccttcttcctttcctttgtctttctctccctcccttccttcttcctttccttcctttcctttctctttccctccctccctcccttccttcttccttccttactcctttccttccttcctcctttccttcctttcctttctctttccctccttccctccctcccttcttccttcctttctttccttccttcctttttcctttctctttcctttctttcctttccttccttcctctcttcttccttcttttctttctttcttttctctttctttctttctttctttctttctttctttctttctttcctttctttctctctctctctctttctttccttctttctccttccttccttccttcttttcttttcttttcctttcttttcttttgttttttgagatggagtctcgctctgttgcccaggctggagtgcaatggcacaatctcagctcactgcaacctctgcctcccggttcaagcaattttcctgccttggcctcccaagtggctgggactacaggcacgcgccaccacacccagctaatttttgcatttttagtagagatggagtttcaccatgttggccaagctggtctcgacctcttgacctcgtgatcctcctgcctcagcctcccaaagtgctggcattacaggcgtgagctaccacgcctgggctaggactaggtttctatcggtggtgtggcttttgggaagctacctaatcttaaccactctgtttcgtcatctataagataagcagtgtagcattttcttgcaggaatgttgcaaggattaagtggatggtgactgtaaaacatcatgcgtggcacatagtaaattctcagcaggtagtcattgctggtcatttacttttctctaatgaccagcaagctcttaatttcctccttggcatgggcactgggacgtagatggacaaaacacagagagaaataaacacacggacaaaaatccccgccctggtgtggctgatattctgggtggggagagagagggagtccaaggaccagataaacaggtaaaggatagtttgagtgtggtaagtactaaggctcaaaaataaagatctcccaggtgatcttagctgcatttggaggtgacaggagatacaactgagaaactgagataggaggaaacccaaggggagatgtgggcttgatttagggtgatctgaggagtaggagaagtcaggggctggtgtggggaggctctgatggttctctctggggagtgaagcagggattcgttggggagacccaaggggacaggtgaaggcccctgaacaggtggccagtgctgagaaaggaaaggtggaggacccaagtgagttcctaatttcttcattgctcccctaaggtgtttgtctcacccttggccatagtcttggatcacttacagatgcagaccaggctgggctcaatggcttgtgcctgtaatcccagcactttgagaggctgaacccaggagtttgagagcaggctgggcaacatggtgaaaccccgtctctacaaaaaaatacaaaaattggccgagggtgttggcacatgcctgtagtcccagctacttgggaggctgaggtaggaggatctcttgagcccgggagacctatgctgccaaataaggtaggcagtagccacacatggctattgcaattttagaaattaattacaggccacatgtggtggctcacacctgtaatcccaacactttgggaggccgaggcgggcagatcatgaggtcaggagatcgagatcatcctggccaacatggtgaaaccccatctctactaaaaatacaaaaattagctgggcatggtggtgcacacccgcagtcccagctactcgggagactgaggcaggagaattgcttgaacccaggaggcagaggctgcagtgagctgagattgcaccactgcactccagcctgggcaacagagagagactccgtctcaaaaaaaaaaaaaaaaaaaaaaaaaagaaaagaaaagaaattaattacaataaaaacagtccctgagtttcactggccacatttgaagtgcccgatgaccctgtgtggcttagtgaccactgtgctgaatagtgcagatctagagcatcctactggacatgttgccagggtccctgaaccaacagaattagcatctcctgggagcttgttggaaatgcagaatctcatcccctaccccagacctgctcaatcccaatctgctcttcagtgagattcctcaggtgatcttgactgcaccttctaatcacttggaagctttaaaaatgctgaggctgggcacggtggctcacgtgtgtaatcccagcactttaagaggccaaggcgggtggatcacctgaggtcagaagtttgagaccagcctggccaacatggtgaaactccatctctactaaaaattacaaaaattacccaggtgtggtggcacacacctgtagtcccagctacttgggaggctgaggcaggagaactgcttgaacctgggaggtggaggttgcagtaagctgagatggcactgctgcactccagcctgggtgacagagtgggactctgtctcaaaaaaaaaaaaaaaaaaaaaaaaaagaaaagaaaaaggaaaatgctgatgccccaagctccacccccacagatgctggagagatttgtccagggcttcccctggagtggggaatgtttgaaaactccccaagggtttctaaagttcagccagagttagcagaaagcccattaggtggctaagcaggtagactgaagttggagctgtgtgaccttgggcaagccacttaccctctctgaaccacaagctcccttctctctaaaactagagacctgctggcacctccctcccagggctgtgagaagtaaatgatgggatgattcaaagtgctgagtagggtcagatgcagtggctcacacctataatcctagcactttgggacgctgaaatgggaggattgcttgaagccaggagtttgagaccagcctgggcaacatttaaacattacccaggtgtagtggtgcatgcctgtagtcctagctgcttgggaggccgaggtggggggatcccttgagcccaggagttcaaggctgcagtgaacaatgatggtgccactgcactccagcctgggggacaagagtgagaccctatttctaaaaaagaaagaaacccaaaatgctgagcgagtgccttggattgatagtaagcagtgcctgtgtaataagcatgaattttaaaaaatgaggtcagcagccttagagctaatggttaatgggtttgggtgtgggatttttttttttttaatttttaaaacattgagataaaattcccataacataaaattgaccattaaccattttaaagtgtacagtttggtggcatttaatacactcagtgttgtgcaaccatcacctctctgtagttcaaagaccccaaaaaggagaccccgtactcactgagcgctcactccctgtctctccccgctcccccagcccctggcaactactaatcttctgtctgtatagattgacctattctgattttgggggtttttgaactcgccttccctggctgacaacctctcgccatccaggtgagactgtgtgaaagcccagctccctgcatttctgggtcttcctctccccactgggggctgcccccacctgtttccccctctgggcaccctggttctactcatcagcctggcttaatcccagcagcaggtccatgttctgctctcctgtggctgccacaaatgagaggtttcatctcagctgggtttctcctagttaaatatttaataaataagacctacaacttgtgatgctgggagtgtttgatagtgaaattaatgatggggagagagtggcaggcggcccacaggtccatgctggagctgggatgaggcgccctgggcaggcgtccgtgccactgatgcttgggaaccacggtgggccatgccatcccatttcccccagccagggcctcttttttagcactgtgtccagcacagggtagccacctgataaataagtgttaaaagaaagagaggctgcgtgtgtagggaagaaggaagagacagaggagacaaagaggagacacagagagagagagagagatgagagagaaagaaaagtggaaggtgagaaagagacagagatggaaggggagagaaggacctggatggaggaagtgcaaggaaggcaatggtgagggaaaagagagagagacaaagatggaagggatgaaggagagggagagatatggaggtagagaaagagagacagaaagaagagagagaatattgcttcttgtatcttccccttctcctgttatccttgaccatcttattatttttttcttttttctgtctctccagttctcatttccttaccctcgccgtcttgccaactcgtcatctcttttcatttcctgtgtctatgttatcttttaattttctgtctgggtattttccccttttctctttctcagcataaactgttggttggtgtatgtgtcttctttcttttttagtctttaactgacgtgtgtgtgtatgtgtgtgtgtgagagagagagagacagacagacagagagagagagagagagacagaacaaacctagagagcagtgtaggaacatagatgaacattttaaagaccaaaccatgaagcgtacacccattttacccaggtcaagagccacagggccaccatcagattctccctcatgctcatcctcaatcacagccactccttccctcctggaggaaccactattggagattgtatgggaaccattcgcttgctttcttgtgtggttgtaccacctaagtacgcatcctgaagcaatatagtcagatattatgtggttttgagttttatatgaataaaatcatgtgagaggagttgttttgtattttgcttcattggtttgcagttacctttgtgagatttcatcctcattgtggtcactgcagctccttcatgatcttgtttattcattgatgatgagcatgtgactttgttctcttttgggcactggcataagcagctttgttggttgtttatggattctgctgctcgcttgcaggggtctctctggagcacatcgctctgtgtgaaattgttggatactaagatttgtacattttcaccttgactaaacactgccaaacaattttccaaagtgcttgtgctaatttacactcctgccggtggtgggtgagcattcaagatgcttcacaaccttgccaacacttggtattgtcaggtttttaagttatagcctttctcatggtgatttctcattgtgattttagtttgcatcccccgattgcaaattagagtgaacatagtttaaaatatttattgactattcaagcttgcttttttgtgaagtgcctctacatgctctgtccatttttgattaggtcacttttaaaaaaaaaatattgatttgtgggtgatccttacatagcctggaaactgattcttcatcattatatgttgtgcaatattttctcttggcttggcttttgatcttttttataatgtcttttgatcaccaacagttcttaattttgatgtggttgattttagaaatcttttcctttatagtttgtgggctttgtatcttatttaagaaaatcatttctaccctgaggccatggatatattttatgttatttctgaaagttttacagttgtgttcactgtatgtctttaatcagcttgggattgatttttatatgtggtggtaggtaggggtccaatttcctttttattccataagaattgtcccagcatcatttattaaaaagcccattcttgccccaatgatctgcaagacaacctcttgactgtttaacttttaccttctttcatctggtctgtttttatactcaacctttgaagccacaaatatttattgagtgccaactgtgtgccaggcactgagttacagtgacggatatgacagatgcaatcatggctttcatggagtttacagtctggcaaggatgacatgtaaatagttattactacttataatttaaaatgttataggccttgcaaaaagggacaagtctggcttgctctaaaagaaacatgtgaaacaacatcttccagggaagtgctgataaactgagtctttagtgggcctctgctattgtaggggtgggaatggtggaaaagatgttttggccacagggaacagcatgtgcaaaggtcctgtggaaggtgcttaggagtttgatatttatcctaaaggcactgtcaggctactgaagcagtaatacaatgattttatgtctgtgaatagttccactggttgctgcatggagaatgtattggaatacagcaagaataaaaagccatgagaccaattaggaaatgatttcactcattcagggaagtgtgccttgggctggcatggtggctgtggagatggaaatcattgatcagattaaaagaaattttgagctggcatgatttttcccctctctcccctctctctatctctgtttcttttctggttgtgttttctgggtgagaaaagcagtttgtgatcctgccaagggtatgtgctctggaggatgtatttgccacagatggtctttggaattctggccaagagagtcactggacagcccctggcccccagggtttctggagccaattcaacaatgactgtttattaacaacagcaaggatgagttgctagcctttccttcagagcaccttttaactgttaccttactttgttacccaaaccgacactatggaattggtgggggagaagtggaagggtttttatctccattttttatagaacgggggaagttaattggcactcttgaaatcatacaaaagatgttggtttcaggattggtttctggactttcagcccaatcccaattactcaagctcacacacccaatccccaaacatactcttttgcaaataatttccctactgaggtgctcctggccaatttaaaaggtccccatttccttgcctataaaatgggaattaaagtaaaaatatctacctgttgacttgctgtgaggtcagtgggcctgacacatggtgtggactcattatatttacctatgtgaatcccttagttccctttacttggaagaggtggaaaactcaaaggggcttaaacaagaagtggggattgtattggctcatgagactgaagagtctcaggagtgtccagcttcaggcttgtttggatctagggatcagataacaccattaggcctctgtttctgtttcttggctctactttttgcagctggctccattatccatgacttagctgcacttccagccctccagtctgcccaagaccatattcagagagagattcttctctctttttcagctatcttcccggaattttcagcaaatgctttcttgcttttgattggctgttgctgaggtcgtgtgctcatgccagaaccaatcactgtggggaaatgggaggtggagaacggggtgctctgattggcttaggcttgggtcacatgactttatggagttggggtggagccaacttctccaagtggggaagagcagtcttcttaaaggtgtattaggatatgcttgctgctgtaacaagcaacccccaagtctgcagtagcttaaggcaatacgaatgtacttctcactcaccctaaatccaatcagataatcagcaagtggcattccatgtggtgatttcaggacccggctctttccatctgtggctccaccatcccctaagatcagaaagtccttcacttccggcctgtaggaaaagagtatgaaggctcacacaggaagttttgggaggccacatatagaagtagtgaaccttacttctgcctgcattctgtggactggaatttcatcccatggtgtatgagagagggtcccagtaggaaacggaagacacagaccaagaatcaaattaagagatagcttaagaatcaaattaagagatagcttacaaaggtgtgggcccttactgaaatagagaaggaggaagagaggaaggaggcagagacagagagagactgagactcacaaagacacacacacacacacacacacacacacacacacacacacacacacaagttgagagaaagaaggggggagagaaagagagagagggagcatttcctaacaggaagctggcagaataaatgtcccccattgtccaaagccagagggctgggagcccagtgagcccatccacacaggtcagccccccatgtgacagtcctagaagggtaaagaaggaaggagagtggatttggggtaatggaagacagccaatacccatggtccatctgactgcagggggaactgagaaattcagtccatggagaagaaggtttagtggacacgtcactttgtctttttcacaaagtgaaactaggttctcaggtggaaaaaagaaaaagaaggtttgccttgctgctattctttttttttttttgagacggagtctcactctgtcacccaagcgggagtgcagtggcacgatctcggctcactggaagctctgcctcctgggttcacgccattctcctgcctcagcctcccgagtagctgggactacaggcacccaccaccacgcccggctagtttttttgtattttagtagagacggggtttcactgctagccaggatggtctcgatctcctgacctcgtgatccgcccgcctcagcctcccaaaatgctgggattacagacgtgagccaccgcacccggcctccttactgctattcttattattggtggtagcagtggtggtgatggttattggttcttagttccctctacatgccagtatctgctctcttctttttttctcccttacttctttccttgttctgcaaattctttccctttaagtgaaaatctttccgtgttctccaagggagataaattctatgccaagcttgagtgtggggtcctctgcttggatagctgtcttctccaggagatgaggtagaactgagatagtgggggtctctgcaggcagtctgtgcccctggcaagcccctcaccttaacctgaggctgggtggggaaagatgccttgatggagtcagaacagaaagcaagtgatcgctgcctgaaccaagcagtcactttcctggaggtgaaacctagaaacggtccctcaggctgggtccagggaggtggacttgggtcccaggggcaggaagcaacctgcccctcacctgctcctacctctttgtagcctatcttggcaaccagaagtaggtatacaagtgacgttgaagctgggcatgttaacaatggtgtgagcccgcctgactccaatctggtccagctgtactggccgtgcatcctcatctccagcccccagggtcagcccagcggctgtaacaatggtctgtcccctccccgccccacccacttctttgaactcctccaaggatctgtgatgatagggctgtcactgtcttagcttccaccattcaagcttaaccggccttcttcccctccatggagaacggaagagcaacccctcattgcctctggcagctgaccagcaggtccctgccttctgcccactcccaggtctaggacaatgaggtgagaggtagacaggaccaagttccccagtgctgtcttctaggtccacctatcatgagagccgtgattcctagtttttatcaccctctccccaactttgccagctctccacttctggcagtggtggctgcccatgacttcaccttcccgtgcctcagtttcctcatctgtaaaataaggacagccatggtaatgagagttctggtcaatatgccaggcacctcgcttgcatcaatttagctcatcctttcagtgccctgaggggtgggtactgttatcatcccgtgtaacaaaaagagaaaaccgaaacagagagagagactcactatctgaggtcttgcacccctcaagcaacaaaagtgggatttcagcctaggctatctagattcggagtccacggtctcaatgaataataacaacaataataatattgtcctaatctgatgagtttttgatcagattcaatacaagagcataggcagaaaagcttagcccagtgcccagcacatggtaagaactcagcatgttatttataatagtaataaaccattttatgttatgtaattatatattcatagataaatatagttgactcttgaacaacataggggttggggcaatgacctcctgtgcagtcaaaaatgtgtgtgtaactttttttctctattttttagaaattttaaaattagagacaaggtctcgcttttgttgctcaggttgatctcgaactcctgggctcaagtgatcctcctgcctcagcctctcaaagtgctaggattacaggtgtgagcccccgcacccagcctgtgtataacttctgactcccccaaagcttaactactaacagtctattcttgaccagaagccttaccagtaacataaacagtcgatgaagacagattttatatgttatatgcattatatactgtattcttacaataaagtaagctagggaggagaaagtattattttaagaaaatcataaggaagagaaaatatatttactattcattaattggaaagggatcattataaaggtcttcatcctcattgtcttcacattaagtaggctgaagaagaggaggagttggtcttgttgtctcaggggtggcagaggtggaggtggaaggggaggccagaaagacaagcacgcttggtgtaactgttattggaaacaaatctacataagtggacccataaaattcaaacctgagttgttcaggggtcaactatatatgctacaaatacgtaatatgctaatatagttgtatgttattgttatagtacggggatcagaaaatgttttctgcaaaggattagctagaaaatgtctagtaaatactgtctctttgggaccactctactctgccattatagcaaaggcagctacaggcaatacgtaaatgaatgggcatggccatttgccaataaaactttgtttacacaaacaagccatgggccagagtttgtcaacggctggtatagtatatgttattatatattagctttactttttctgttgctttgtttatgttcttctttgcccttcctttcttaaaggccagcctttctttctctctgttggtctgtcttttaggacagcatggcaggccactgggacatgggctctcctgactccaggcttgtttgtctgataagacatgaagagtgaaggtggcaggactctgagctcaggcctgtcctcctcctcttccctctcttcgttttttctttcctctttcctcttttcttcccaagctccagaagttgccattttcctttcccattgctgattttctctgccttgggagaaagcccgagaagatcacttggaaaagcccacgagcatctctggcctcactcacccagctcctgccattgtctttactcttcctcagacacaccaggcacagtcctacctcagggcctttgcactggctgtttcctctgtctgcattgttcttctctcaggtgacctcatggcttctccctcctctccttcaggacttcactcaaaggccaccttctcagcatttgcctcccgcccttctgccttattttcccctttggaacttttcaccttcttacttactcatctgtctgctatctgtcaccctacatcactatgatctccacaagggaaggtgattttattcgttttttgttctgttttgttgaagatgaggttttgctcttgttacccaggctggagtgtggtggcacgatctgggctcactgcaacctccacctcccggattcaagtgagtctcctgcctcagcctcctgagtagctgggattacaggcacccaccaccatgcctggctaatttttgtatttttagtacagatggggtttcaccatgttggccaggctgatctcaaactcctgacctcaggtgatccacccacctcagccttccaaagtgctgggattactgtgagccaccacacctgatcttttggttttacccaccaatgtggactagaacagcctagatcagcaggtggcatgcagtaagcagttgataaatatgtgttggatgagtgagcactgtggcttctgtcattctgttgctcaatagcattcatctggaaataaccacagtttgtttatccatttacctgttgattggcatttctgttgattctcgtttgggccattatgaacaaagctgctgtgaaatacttatacctttgcccaattcttcacttggtgaacccttataaatcctttaggccaggtgtggtagctcacgcttgtaaccccagcactttgggaagccgaggtaggaggatcgctggaggccaggagttcaaaaccagcctgggtaacatagcaagacccgtctctacaaaaaaataaaaaattggctggacgtggcaatgcatgcctgtagttccagctacttaggaggctgaggtgggaagagtgcctgagcccaggagttcaagaccgcagtgagtgatcgcgtcctgcactccaggctgggcgatagagtgagaccctgtctgtaaaaatgacagcaacaacaacaataataaaacctttaggtttcctcttaaaaggaacatccttagagcttttcctgacccagcaactcaccccaagtctgaattagacttcaccccatttctttcataacatttatcacaatgacatgtttattttgtgggggcgggtggcattctggccagaactgtcgacttccagagtgaaaatacggaagaaccaaataaaacacaacacacacatttgcacagcagctcgagggaggtgcttagttctttgagtttccaagaacagagagacgaagatttgtctggggaggaaaaatcagggactgcttcttggaggaggtggactgttgctgccccatccacccacacatttgcagatgtggtgatgagaagatgactgtcacgaggtctctgagcccagggggcccatggttgagtgcaaagatagtggggttgacaaataatcgtcgtataacaaaagaaaagccaccacagttgcataatggaaaggcggcttctatagaacattcagatcatagttgaaggcatgtcacactgtgttactcagaggccactgtcagagccaaaagtgagagtggatgagagtttgggcaggaaacaactgaaccagatacagcatcacctccatgagggctcagctttatctattttgtcttctgttgcatccccagcccttagaacactgcctggtccatctttgctgtgtgaataataataaggaacgatcgctgtgttgagtttgggctgtgaattcagacagtttgctgctgcatacctgattatgagtctcagttttcctcctccataaaatgggcaaaacagtccttgcctcatggggctgtgcatttgtttagcaaacactgaaggagtatacatggtggccaaggcactcttcaagacacaggaagcagacaaaagtccctgccctctgggagcttacatgctcatggggagagatgtatgataagaaacaaaaatagtaggtaagttgcatagtactttagaagattataagggtaatgggaagagaacagcagagaaagggctggggaggcagttgctgtattagatagagctttatcgaggcgatggcattggagccaagacttgaggaagctgtgaggatgtctagagaaagaaggaacagctggtgcaaaggccctgaggtaggggtatatgtgacatgtgtgacagtgaggaggcagatgtggctgaagccagtgagcaagagagagggaaggtgcaaggataaggacagagaggtgacgggacaggttttggagggccttatgggctgcggggaggactttggcttttgctctgagggagctgggagccacggagggcttttgagcagaggagggacgtgacctgactcagatattcataggctcctctggctgctgtgaaaagaacagactttgaaggttgggggcaggcagggcagaagctggggaattaggaaggaggtgacagtgttggtcctggcaggtaatagtgggggtggaaccaggttgttgtctgtggagataataatgagtggctggattctggttataatttttaagtttttttattgtgataaaatgaatttttttattgtgataaaatgaaatttaccactttgaggtgtgcaattccacagcacttactacagtcaccctgttatgcaacagtcacctctatttaatctcagaacatttcatcccccctaaaggaaaccctgcacccattagtagttacttccagtttctcccttcccccagcttctggaaactactaattctggatataagttgaaagttgaccagtaggatttctaggcagacaggtggtgagggctcaatgcattcatgcacagaaagtactcaggtggcatatcataggtgctcaaaactgaaatggtgatgatgagttggcaatgatggtgagtccttccagaatccctgctctagtgctaaactgacctacctggctgtgtagaattctcacctgctggccgggagggtggcagaaccaggatcccttcttacttccagtctggcttgggttagggataggggaggaatgatcagaagaaccaagctagcaccatctgttctggaacatcatccaactcttgtccagatttcccagaactgagcaggaaaatgtccagggaggaacagtgcagctgatggaagtcctggtaagccctggccccagcttcctgagctgctgttgcaccaactagcatttgttggaccttcagtctgagccaagatggcagcttcagaggaagaacaagaagtgtacaagtttctttcatggttgtgtccccgcctccttatatagcctcatataaacccctgcactatcccgttactgtttgcctctccctgaaaagagtgtaaaactcccccactttttccctacttttcacaatgtgttttggtttctaaagatgaaactcctttaattatgttctggttgtaattttctggctccttttatttctcccttacttgatgtattattttcccttgttccttctgccccctgcctccattgatgtttctcttcactgctatctagatttaattctcaactcctgccaagttcagggtgatagtgcaaaaagacatggaccatttagtcttgaattcaggtcccacttctgacaccttcaaagctgctttactttgggcaagtcatatgatcttcctgagggggtatcctttaccttgttcagctaacatttcttgtttttctctgggcacagagtagagtgtcattttccccacctccctgaagttaggtatggctgtgtgatttggtttcatcaatgaaatgtgaggggaagtgacgtgagtccttccggacagaagccttaagggtgagcatgggattcaccatgtttcctttttcctgcctccactgtcatggatgcacaaagatggaccctctctcaaagtaagtgctggagagaggatgacatagatcagtccccatcccacttcatagcatgagtagaaaaatagacctggggtgtgttcaaccactgagatctggggattgtttgttactgcagcaggacatagactaggctgactgtatacctcattatctgcattttggggctgatatctaatcacagtgtctccaggaagattatgttgatgtatgttttagggatggatattcatattttcctataagggctcaataggtttggaaatgtcacatgcatgtaaacttctgattaacaaatatttcttgctttccaatttcttcctatagtgcttctaattttcctgtttttcaatcttgaataaaatgtgagaagtgtttgacttctccttcgaggagattaatggtttctaaagcctggggcattgatttagtcattctcaacctccttgtttctatgacctttttttctccttctctggtcacttagtgtctgctaaggggtgaaggaatgtctgttttaactcattgcattttttttttttttgagacggagtctccctctgttgcccaggctggagtgcagtggtgtgatgttggctcactgcaacctctgcctcctgggttcaagtgattctcctgcctcagcatcccaagtagctgggactacaggtgtctgccaccactcccggctaatttttgtatttttagtagagacggggtttcaccatattggccaggctggtctcgaactcctgaccttgtgatccgcccgccttggcctcccaaagtgctgggattacaggcgtaagccaccacacctggcaaactctttgcatttttaactcttgacatcttcatcttctttttcccacctcccctttgcctgttcctcccctgctcaccccaccagggagtttataatcaggttctagaacctgcaatgtttttctgttgttgtcttccatcttccttgagtcttatgggaatcggccatagtcgcaaattaacaaatagctctgaagcgcctcaagcttggaggcatttccttttgctcacctaagcaagatcctggagctgttgcaaatatcctgccccctactgtaaatctgtcttcatggttgtaagagattcagtcggggtcagtgaagacccgagcaggagatcttggccgaggctccttgatgttctgtctgcgctgggtgttgtcatattgattaagctcctgggactgctgccagcagcctctaggattaaatcaatagagtttgcaaaagtaaaagcttcttttggagacacagaatatgtgggtttattttttaatgataaagcttcaaggagaatcttcatggatggcagaaccagtgatggaaaaggcgaggcagacccaaatatttggggaagtgcagtggggagcaagtgagggaggtttcattgggaggccggggctttccagaaaatctgtttaactggagttgctaatgcaacagctcagagttagaagtgaaggtggaagatgcaagaaggactgccgctgagatgtaaagagaaatgaaggagaggtggatccatttgctcattcaataaacattttgggaggcaggggggtgggggggagcctgccatgtgcctggaactgggatgtacatggtggggacatgacagtgggcaggacagatgtggttcctcctggccctcctggaacttgtaacaggaaaagaaggcataaaataaggaataggcaaatacagacataattactaattgtggtaagtgtttgggagaaaaccagcagggtcctgtgtttgtttcctagggctgccaggacaaattgccatgaactatatggcttaaaacaacataaatatattgtcacccagttctgaaggctggaagaccaaaatcaaggcatcagcagtgctgagctcccttggacggctctagagaagaatgcttccttgattcttccagtttctggtagttgttagcatacattggcttgattggcttgtggctgcatcactgcagtctctgcctctgtcttcacatggccttctccttcatgtcagtgtcttctcttcctcttctctctctctcttttttttttttttgtcagggcctcactctgtcaccctgtacaagagtacagcagtgcaattatagctcactgcaactgctgcttcccagcatcaaacaatcctcccacctcagcctcctgagcagctgggacttacaggcgtgcaccaccatactcagctaatttttaaatttttgatagagatgggatctcactatattgcccagactggtcttgaacttctgggctcaagtgatcctccctcctcagcctcccgaagtgctgggattacaggtgtgagccactgcacctggcctcttctgtctcttataaggatctttgtcgatggattttgagcccgtcagataatccaggacaatctcatcttgagatctctaatttaattatacttgcagaggccgttttactaaataaggtcatggccagaggctccagaggctaaagcatgggtatgattgcaccactgcactttaggctgggtgacagagcaaggccccatctctgaaaaataaaataaaataagtaacctactacaggccctttgcgtagaggataattagaagtacaggggtaccacgtaagtgaagacctgaaggttgttaagcacagagcagagtgtgaacagaatgagacagagggaggaagagaatcccaggcagagggaacagcatgtgcaaaggccctggggaaggaacaagttcatcatgttaaaaatgagccagtgtagctagagtctgatgagcaaagggactcacaggtgggaagacacccaagaagttggcagagacaggtcacacaagaccttctaggtcaagttccggaggtgaactttattctacatgcaatgagaagtcctcagagaagcttaagtgggatgggacagaactgctttactttaaatatatatacatatatacaaacatataatattacatatataaagcatatatatgtatacatatatacatatctatctacctgtctatatattttttagctgggcatggtggctcacacctgtgatcctagcactttgggaggctgaggtgggaggatcacttgagcccaggagttcaagaccagcctgggcaacatagggagaccccatcactacaaataaaaataaaaattaaaaattagctgggtgtgatagtgtgcacctgtagtcccagctacccgggaggctgaggtaggaggattgctggagccccaaaggttgaggctccagtaagccgtgattgtgcccctgcactctagcttgagcaacagagtgagatcctgtctcaataaaataatttttgtattgaggtgaaattcatgcaacataagttaaccattttaaaatgagcaattcagtggcattcagcgcattcacaatattgtacaacctccacctctttctagtgctgaaatattttcatcaccacccctccagaaaaccctgtatccatgaggcagttgctcctcatcctcccctcccggtatccccccaacccccaccactcctggtaactacaaatttgttttctgtttctatggatttacctatactggctctttcatataaatgaattcaggcactgtgtgacctttcgtgtctggcttctttcacttagcataatgccctggcttctctctggagaatgaaatggatagaccactttggagtctactgagattatagatatttctgtgggaagggacagtggcttgaccttgggtggtgctgaagaggcaatgctgagcaggaggattcaaagtctaatttcggaagtagaattggtggggtctgatgatacatcagctgtagggggaggaagatgtaggaactgggaaggtctcttagggtaaccttacctgattgagctccttactaggcagctggtggtacaattcataacaaaggttaatagagaaagagacatgggattagggagggaatggaagagtttgggccttggacactgtagtggtttgaatcctgtccaccaaaaattcagatgcatttggaacttcagaacctgagacctcatttgaaagtaggatctttgcagatgtcattgagtcagggattgagatgaggtcatcctggattacagtggactcgagattccatggtaagtgcttttatatgagaaggtacaggggagaaagtcatgtggcaatagaagcagagaatggagtgctgcagccacaagccaaaagacatgtagaggcaccaaaagcgggaagaggcaaggaaggatcctcccctagagcctttgaagggaaaccccctaatttcagaaccttgcctccaggatgacgagagaataaatttctgttgttttaagccacccaatctgtggcaatttgtcatgactgccctaggagactaatatagacactcctatgagatgctctaagaagacacagagtggtatagctattgctaagaccacacactgtagcagggaggaaatcaaatggagaaatgccccaactccccctcctctctgatctcttgctggtgcctcccgttggccaagccaacccagaaggcagaagatgtggtggagggcagcgttgcagggcttggatgatgcagtcacagaagtcagccctgcctctaccaggatgccaaacagggcaatgagtggatattttagggagaaagggcaacaagagaatggcaaaatacatcgaaatgcatgcaagctctagaaagaggatagagatagataaagggtgattacctaggattaagccccagggaagaccaacatttagagattggatagaaaaagaggagcaaaaagggaagattgagaagtagagaccaggaggataggaggaaaactagaacaacattaagaagggcatggtcaagtaatctgggcacagaaaaatggccctgggatttggcagcctgggggtctttggtgatcctctttggaagagttttggttgagtgatgggggctagaaaccagcctggggagggtaggagaagaatgtgcagtgaggaagtggcaggaacacgtgaaggcaactcttcatgaaggggagtagagaaattggttggtggctgaaggaaaattttcagtcaagggtggaggttttaatgatggaagaatattgatttctgtaaattgggtcattcccatccattataccaatatgcacgggtgtcttctctgatataggatgctgggattctcaaatgcccatttgagtttagcatcatgaatttaatgtcaccagcccagatagttgatctcattcaggaatgctccactgcccaggtatggggaaggcaactagttgagttcatgcagggatggattttttccaggagagaaacaggaggcaagaaagtgcgatataatcaacctatgtaaggttgacaaggcaggagagggtcctgagaaatggcggggtcagtgggttgcagggctcgatgggatggacgttggtttgcatttaagggagttagtgagctgggaggtggttaaagaggaggtggttcagccgggcgcggtggcccacacctgtaatcgcagcactttggggagccgaggcgggcggatcacaaggtcaggcgatcgagaccatcctggctaacacggtgaaaccctgtctctactaaaaatacaaaaaaaaaaaaaaaaattagccaggcgtggtggcgggcgcctgtagtcccagctactcaggagcctgaggcaggagaatggcgtgaacccgggaggcggagctgctgtactccagcctgggcgacagggcgagactccgtctcaaaaaaaaaaaaaaaaaaaaaaaaaaaagaggtggttcaagacaaggatgctggaaacaggtgttttggaggtggctggtgtagcttctgagcatgcatagctggagtggcttggaggagacattggttattgatgaagaggtagggacatcctccagtgatcaaggaagcaggggaccagcatggacaatggtctctccacagggaaattggaggtcatcaaatgttaacaggttccgtcggagtcttagctcccagcttctgttttcctgtggatctcaggatcttggctgctggtgctacctctgactttggacttcccattgagcccagcagcactgggagggaccttcatggcattggctggtttaaggaagacttccttggctttgctgactttcttgggggccttcttggctacacctgcttttgagggagccctcctcacctcacctgacttcttgggggcaccttttccaccttatctgagttgggaaggtctttctttgattctcttgctttcttggggcccttctcactggtttttctgggggccatgatggtggacatattccagagctgagctttccttttgttcttaggaactaatttgaggctgccagtggccccaccttggtcttagagttgatggtctgcagggaatttccaggttaaaggttttttatttgtttgtttaattttgagacagagtcttgctctgtcacccaggttggagtgcagcggcacgatcttggctcactgcagcctccgcctcctgggttcaaacagttttcctgcctcagcctcctaagtagctgggattacaagcacgcaccaccatgcccagctaacttttgtatttttagtggagacagggtttcaccatgttgaccaagctggtctcaaactcctgatctgaagtgatccggccaccttggcctcccaaagtgctgggattacaggtgtgagccactgcgcctgacctccaggtttaagtttaaaccatgaagtagatggactgtgtagagagagaccagggaaatggaggattttactgaccactgaacagggatgtcactattgccagagaggaaaaggattcccccttggtagagtgaacatataagggaaagtggttgaaaattgaatcaggagacagagacctcacaccactcagaggtccctagagaactttactgacctagaaaaaaagataaacagggagaaggtcttcagttcttgtttggaatctgacactgaagcatcctcactcctcactctcttcccgaccccgagagtctgaaattgattaatactttttgtttaaaacttggcttgttgttttgttttttctttctgttttcatcaagggatctttattttacttttgtgtatttgtgtgttttccatgagtcatgttaattcttccatgtttaaactttttggcccagaggaatttatacatttaaattatggatttaatttcagaaggtacatacacacacacacacacacactcactcatctcactttttaaaaactgtaaaatatagccctgtaaatatccagaaaatatctaatgtgggccgggtatggtggctcatgcctgtaatctcagcactttgggaggccgaggtgggtggatcacctgaggtcaggagttcgagactagcctggccaacgtggtgaaaccctatcctcactaaaaataaaaaaattagctgggcatggtggcaggtgcctgtaatcccagctactcgggaggatgagacaggagaatcacttgaacccaggaggcagaggctgcagtgagccgagatcaccccactgcgccccagcctgggcgacagactgagactctgtctcacaaaaaaaaaaaaagaaaagaaaaagtcagtgtgcatcccctctgacatccagcaacttcacatcttggaatttatgctgcaggaaaattatcacaagtgcacaaggatgtatggtgagatagttattattatcattttaaaagatagggtctcactgtgtcacccaggctggagtgcagtgaagtgatcacagctcactgcagccttgaccttctgggctcgagtgatcctcgtgcctcagcctccccagtagctgggattacaggtgtgagccaccatgcctggcatccccctttttttaaaaaaaggttttaattatgaaaagaatatgggcttgttgttttgtgtggttttttaaaagcttaaaaaatgtgtagtgtgtcatttagaaggtgaaaagcccttaccccatcccacctcccagagataacctctgctagcaatttcgtgtttgtctttcaaattttttcccacacacattctttgtactggctgcttcccctcctgggttactcttctcccagacagaaacagggctcattcccttgcctcctccagcttttattaaaacattaacttccctgtagctggatgcagtggctcacgcctgtaatcccagtgttttgggaggtggggaggcaggaggatagcttgagcccaggagtttgagactagcctgggcaacatagcgagacccatctctacaaataaataaataaataaataaataaataaataaataatggaaatttaaaagagagagggaaggactcttgaaaaccgtccatatcatgcttctctaaatggttgagggctcagaggaaaaaaaatcagcaatttcacatcacggaatttattctgcagaaaaattctcacaagtgcacaaggatgcgtggtcagatgatgatgatgatgattattattattattattgaagaaagtagcagcagcagcagcagtattttaaaagacagagtctcggatgggcatggtggctcacgcctgtaatcccagcactttgggaggttgaggtgggcagatcacttgaggtcaggagttcgagaccagtctggccaacatggtgaaaccccaactctactaaaaatgcaaaaattagccaggtatggtggtgggtgcctgcagtcccagctaccagggaggctgaggcacgagaatagcttgaacccaggaaatggaggctgcagtgagccaagatcgtgccactgcactccatgcactccagcctgggtgctgacccaggttaggtgcaagactccgtcttaaaaaaaaagaaaaggaaaaaaaaaaaaaaaggacagagcctcactgtgtcgcccagggtaaagtgcaatgagtaaaggcccatgatgggaaccctgaggagagagtcaaggggaaagaaaaaaaaaaaagcaaaaccaaaatggaatttaaaaaaaatcaggtgcaatttgcataacagaaaattaaccattttaaagtgaacggctctgtggcatttactgcactccaactgttatgtaactaccacctctgtctagctccagaacattttcaccacccctaaaggagaccttgtacccattaagcagtctctctccttctcccctccccaccaccttcctccagcctctggcaaccacccatctgcattctgtctctatggatttacctattctaggtagtcaacaggatgagatatcccaaaagtccatccatggatgaacagataaaccaagtgtgatatgccttcctcagatattagtctgccttaaaaaggaatgaaatactaatctttgctacaacatagatgaacctcaaaaatatgatgtggctggacacagtggcttacacctgtaatcccagaactttgggaggctgaggtgggcggatcgcttgagcccaggtgttcaagaccaccctgggtaacatagcaaaactccatctctacaaaacaatttacaaaaaactagccaggtgtggtgacatgtgcctgtagtcccagctattcaggagactgaggcgagaggatcgattgagcccaggaggccgaggctgcagtgagccatgatcataccactgcactccagcctaggcaacagagtgagaccctatctcaaaaaacaaaacaaaacaaaacaaaaaagttgatgctgagtgaaagaagccagacacaaaaggcaacatcgtgtttaattccatttacatgaaatgtccaatgaagattttttttggcaacatttattttgagtataatattcagtgagtggaccacacatatgcatgcactgcagtatgttcttggaaacatttcagatttgagaggtctgttcagctatgatgacggtaggtattgtcccttccctccctccttgaagaaaaggaactaaggctggacgcggtggctcatgcctgtaatcccagtactttgggaggctgaggtgggcagatcacttgaggtcaggagttcaagactagcctggccaacatggtgaaaccatgtctctactaaaaaatacaaaaaattagccaggtatggtgctgcacgcctgtagtcccagctactcgggaggctgaggcaggagaattgctcgcacccaggaggtggaggctgcagtcaaccgagattgcaccattgcactccagcctgggtggcagagcaagactctgtctcaaaaagaaaagagaagagaagagaaaagaaaagaaaccaaaagaaaaggaaagaaaagaaaaggaaccaagacctagaagggcaaaaataggaaaagttggccgggcgcagtggctcacgcctgtaatcccagcactttgggaggccaaggtgggcagatcacaaggtcaggagatcgagaccaccctggctaacacggtgaaaccccgtctctactaaaaatactaaaaattagccgggcgcggtggcaggcgcctgtaatcccagctactcgggaggctgaggcaggagaatggcgtgaacctgggaggcggagcttgcagtgagccgagatagcaccactgcagtctggcctgggcgaaagagcaagactcggtctctaaaaaaaaaaaaaaaaaaaaaattggaaaagttatttactattagcagcaattgtcataaagtaatgaacatttattgcatgattacaatgagataaattgtatcctgtttttataagcatattaagttttcttttttaaaaaaatgtatgtatttatttattttaagagatagggtcttgctctgttgcccagactggagtgccatggtatgatcatagctcaatgcagcctcaaattcccaggttcaagcaatcttcttgcctcagtctctcgagtagctaggactacaggcatgtgccaacatgcctggctagttttcttatttttaaatgtatttttgtagagacaggatcttgctgtgtcgcccaggctgtcctcaaactcctggcctcaagcgatcctctgccttggcctcccaaagggctgagatgataggcatctacctctgcatttggcccacattaaattttctagtcatcatgggaaccaaaataaacaatataaaacactcacattccttgagcacttactatatgcagggccctgtaatagattattgtgtgtatcagctcattccattctcacacaacctatgaggttgatgctattttctaccttttatatatgaggaaactgaggctcagagaaggaaactgccttgcccaaggtcaaggccacgtctgatccccaaatcctttcaactcctctgcactactattttttagtgcagatattgccagttttctaagcagaagcatgatttagcagccctgagtagacttctcatttcagaaccaaagtgttggacattgttggataatatgaaaaacaaatgacacacaaacctatttgatactgtttttaattttctcttcatttgattttcctgatgacatgattaatcttttttgcctctaccctgtatgtgaaatgtaggtctttgcagatgtctcagagagtgttaatagttgctgctggttttgttttctctccccggggattcccatccctgggtgcaagtgaaattaaacttgtgcctctttgccgctggccgtggtgctgaaaacatcccgggcagcgctagggttgcccttgttagcatgccatccctgctaagagtcttaggctgatcagcgagtggagagatcttttccaggcttcattttggttagaactgtgtgttgaagattttaaagcccatgtctgggaactggagactgtttggattgtttgaagttgaaatagtcatgaataattcctacttgagatgggcttatgagggcgtggactagcatgcaatggttggcctttactaaactgtggccattggttgggacttgggtgaggtgtaacccatttggtctaatccatatggttagggccccaagtgcacctgcattctatttttttttttttttaaataaaggcaaacccatctatcttctaaccaggatagctcctgagtggtctttggggaccaccagcttaaaagcatagactgtgggctgggcacagtggctcatacctgtaatcccagcactttgaaaggccaaggtgagaggatcgcttgagcccaggagttcaagaccagcctaggcaacatggtgagaccctcatctctacaaaaatgttaaaagttagccaggtgtgttggcatgcacctatagtcccagctactcaggaggctgaagtgggtggatcgcttgagcctgggaggtcaaggctacagtgagctgtgatcgtgccactgtatttcaccctgggcaacagagcaagaccctaactcaaacaaacaaacaaaaaaaggcatagactgtggagttgggcagacctgggtgtgagccccagctctgccagtacctcctatgtgaccttgaaaatttgtttaatctctctgagcctggattttcttgtgtggaaaatgaggcttaccacagaacccaccttgtagaaatgttgcaaggaattaactgaaacaaagtgcttaccacggtatctgcccaaagaagcagttggaaacaaggcagctgtaattatggtcgctgtgcttgttaatggccccataatagttgatcatattgcagagtgaaattggggtatgtgtttaatggaccaaggaatatgtcttaaacccatatatctagggttctggtaccctctactctttttcctggtgattgtgatgagcatggaacttacatgaaaatgaggtctgtttggcttcttcacacaagctcaatgacctggctaactgctacaagtatctgtttccttagaacccacccatcagcagtccccatagtggagacaaggtcacaaagagttgacaaacctgatttgatttccgcaccaaccacaggaggcttgaaatgagatgagggtgaagggcaccacagagggatgcaaggattacttggacactgcaaggtcttgctaagggatgggaaccatcagccacgcccactttgagaattttccttcatgttctgaatctgaagagcaaggtcctgttctcagatgcaagccctccttcttccctacgcagagtcaaacttggtcttttccagggtcacatacagcctctctctggggcctctgcaggtcctgatcaatttcattgtgtatagagctctgtgtctcctcacctgcctgcagggctgtctgctatcctgacttccgagagccatttcggaagccagcttttcctcccatcagggatgcttctcttctttcagcccccgccccgctttggcctcctaggatggctgatttttctggatcccgctgacacaggtgctttctctccgagccaatcagggagcagaaaggctcagctcagctaacagaggcattgctcaccgcagctgtgagttagaactcaggctttctaaatcgggaggatcaggcatgacttgaggttgggctgagaaagcctcgcctgccccccagctcgactacccagtgaaacctttggcttctgcctcgggcgaggcatctcttaccatgccaagaactcagcagcccatctttctttcatctgggcaccaagtacatcattgcatatttcagggggtttcattgtgtccttaacatgctcatggagacttggcttgagatgaagtcggggtttctaggcagcaggacccatgtccccttccttcatttcctccaccggtgatttttgttttgttttgttttgttttgttttgttttgttttgtttttgagacggagtctcgttctgttgtccaggctggagtgcagtggcgttatctcggctcactgcaaactctgcttcccgggttcaggtgattctcctgcctcagcctcccaagtagctgagattacaggcgtctgccactatgcccagctaatttttgtatttttagtagagacggggtttcaccatgttggccaggctggtctcgaactcctgacctctggtgatccacccgcctcggcctcccaaagtgctgggattacaggtgtgagccaccgcaccaggcccttccactggtgttttttgagcatctactatatagagaatgctctcctgggcacagaggatgaagcagtgaacaaagtagacaaaaaatccccacgtgcatagagtgtgcagtctcgtgggagagacagggaacaagataaagaaggaaaaaaatagcagatgcttgactggggacggggactaaagaaagaaaaaaataagcaggctaagggggttgatggatgtgacctttgagtaaaggcctaaaggaagtgagggagggagtcatgtggatgtctggggaaagactattccaggagaatgaacagcaggtacaaaggcccctgggtacaaatgtgcctggggagtttggggaataaaagggaggccggcgttgctgtagctgagtgactaagggagagaatagaggagatgaggggagggaggtaatgggagcaggtcatgcaccttgctggtgctggaaggactttgtttttgcttttgagtgagatgggatccatgggaaggctttgaatacttccacatgcattaggctgaaattttcttttctgcttttgtcgcattccaacattgcttttatttcatcaaaatcttcggtttcttctcaggctctttacccaagtgggagcagaaggctggtacccagggctgttcagttctccccctggggtcagaacgtggaggagaaagcttggaggagaaacaggaacccccacctctttctggatgactcaaaaccgcaattacctgagctcctcctcctatccctgaaatagaggcacttagcacttcctaaacttcccggtgcacacaaatcccctggcgatctttttaaatgcaggttctgactcagcaggtggatgcaaggtctaaggctgcattcctaaccggtgctggttctgggaccacactttgagtagcaagggtctgaggtcattgttgcagatgtccatctggggcatgtctgtggacacttgcgggggtgcgggtgagcagagggaggggggatgatgttggaaaagcagtgtgagtatctgtgtttgataagaagtaagaaaatgaagcaaggtgggagagtagaacctctttatttttgcctacgtgctaaggttttattgccatacccagagagccctgggtctgaaatccaggcaacactggccagttgaaaccctgatattgcagcccataaaagtgctgcatgctgcatggtggacttctgggactcttcctggaaccttcagtgccagagccggtccaaaggaagtcacatccctgccattgaggggcaggagaccagggaaccggaggagtgggatggcagaagcgcgtgtaaggaggctgagttggcagggagagaaagcgaagtcagcttcaaatcatagcgagaggagaccagggaagggcttggcgttgctgctctgtgtacaaatattgtctcttattttccaggctgcagggtgaggcagagtggagtatttgtgcaacacagcccagctttgttctctgggctcctaatgcctgtcagctcagaggcagaaagccaatcagagatgatcgtcggcaaggccggcttttgttggctccccaaattgccctgagtctcggattttgcttttcagagtgtgctttcagctggaggcaaaggctgaagctggtgacaaaaggaagcctggttttcctggctttccgagacttttactgagggggtttctatttcagactccgttttcccacctggaaagcaggttccactctccctccggcctggaagggatggttttatggtgcttccaaaatgccaaacctaactccagggcagaagaggagactgaaaccaattaattttccaaaggttagagctacgaggaggggagaggtttagcatggtcaagttccccaagacatactaattgatctctctacagaatgcgggatttcagtgcccccaggggacactcagcaatgtttagagaccacttgaggttgtcatcactggacaggaggggctgctactggcatctagcacacacaggccagggatactgttgaacatgctgcagtgcccagacagccccaccaaggagaatgatccacccctaaacctagtgctgaggttgggaaatcctgctccggagtaaccaacaccctatggctttttcactcaagcagccgcttctccagcgcttacacctcctcagagattgccagatccatatgcagagcctgttggcgtgggacacttctgaggggtgtggcagggagacagcggacattcccatttaccagctgatcagcaggttaggagctaatatgaaatgaacaagatagaccctccccacctgccctgcagatcctctggtgggacactagggagggaggcctcctaaacccaaatgacagttcccaggatgcagggaggagtttacctatgcaaactggagagaatgcaaatggggcatctagagatacttactggacgacccctcccctgcctcgggtcttggaagaacagattctcagaggtctgccctgatcactgtaattttttttttattgaggtaaaattaatataacacaattaaccattttaaagtgacatttagggctgggcacagtggctcatgcctgtaatccccgcactttgggaggctgaggaagaaaggtcgcccaggagttcaagaccaccctgggcaacaaagtaagactctgtctcttacaaaaaaaaaattaggcacacatggtgttgtgcacctgtagtcccagctactcaggaggctgaggcaggaggatcgtttgagcctaggaattcaaggctgcggtgagctatgatcatgccactgcactccagcctgggtgacagagcaaaattgtgtttctttaaaaaaataaaagtaaaaataaataagaaaagaaaggagaggggaggggagaggcgtttagtacactcacaatgttgtgtaactgtcaccttcatctagttctaaaacattaagcagccactcccatttcccttgccattccccaggaacaacaaatctgctgtctgtctctggatttgcctgttcgggatatttcatatacatggaatcatacaatatggggtattttatgtctgcttctttcgcttggcataatgttttcaaggttcattcctgttctatcatgtatcagtacttcattccttttttttttttttttttgaaacggagttttgcttttgttgcccaggctggagtgcaatggcacaatcttggctcactgcaacctccgcctcccgggttcaagcaatcctcctgcctcagcctcctgagtagctgggattacaggcatgcgccaccacacccagctaattttgtactttttttagtagagatggggtttctccatgttggtcatgctggtcttgaactcccaacctcaggtgatctgcctgcctcggccttccaaagtgctgggattacaggcgtgagccactgcacccggcctacttcattcctttttatggctgaatactattccattctatgagtagaccacattttgtttatccattcacccactggtgaaatttaggttgtttccatcttttggctgttgtgaatagtgctgctgtgaatatttgtgtatgagtgttcgttggaatacctgtcttacgatccttttgtgtttataccttggagtggagttactgtgtgtcacatggtaactctgtgattaactttttgaggaaccaaggaatggttttctatggcagttgcactggtgtttttttgttgttgttgtttttgttgttgttgttttgagacagggtctcactcccattgcccaggctggagtgcagtggtgcagtcatggttcactgcagcctcaacctcctggggctcaagcaatcctctctcctcagcctcccaagtagctggcactacaggcctgcgccactatgcccggctaatttttcatattttttgtagagatagagtctcagtttgttgcctaggctggtctcggactcctgtgctcaagtaatcctcctacctcggcctcccaaagtgctgggattacaggcatgagccaccgcatctggccagctacaccattttatattcccaccagcatgagggtttcaatttcttcacatcttcaccaacacttgttttctgtttgtttgtttgtttttaatagctatcctagtggatgtgaagcagtatcccgttggggtttgatttgcacttccctgatcactaataccctcatgtacatattggccatttgactgtcttctttggagaaatgtctattccagcctcctgtccatttttcaattggattatctttttgttgttgtgttgtaaatgttctctctttattttttatttttttgagacagagtctcgctctgtcgcccaggctggagtgcagtggcacgatcttggctcactgcaagctccgcctcccaggttcacgccattctcctgcctcagcctcccgagtagctgggactacagatgcccgctaccacgcccggctaattttttgtatttttttagtagagatagggtttcaccgtgttagccaggatggtctcgatctcctgacctcatgatccacccgccttggcctcccaaagttctgggattacaggcgtgagccaccacacctggccgtaaatgttctttatatagtactagacccttatcagatacatgatttgcaaatagcttctcctattctgttacttgccttttaactttcttgataacgtcctttgatgcacaaaaggtttaaattttgataaagcccagcatatctgttttttcttctgtggatcatgcattaggtgtcaaatctgatcataatgttttatttatttatttacttatttatttattattttatttatttttgagatggagtcttgctctgttgcccaggctagagtgcagtggcatgatctcggctcactgcaacctccacctcccaggttcaagcgattctcctgccccggcctcccaagtagctgggactacaggtgtgtaccaccacgcctggctaatttttgtatttttagtagagacagggtttcaccatgttggccaggctggtctcaaagtcctgaccgcaagtgatccacccaccgcagcctctatctatttttaatttatctctttttttttttttttttttgagacagggcctccttctgtcacccaggctggagtgcagtggtatagtcattgtacactgcagcctctacctcctcggctcaagcaattctctcgcctcagcctcccaagtacctgggaccacaggtgcctgccatcatgctggccctgccaccatatttgaaattgcagccctgaccccttccactgtctatagtcttcaccatcttactacataacatagcatatatgatgtactgtataacatggtatatgcagtgtactgtatagcatagtatacatgatgtagtcatctcatttatttgcttctcctctgggaagcaggaggaagcttctcctcttgtctgctttgctctcaactgtgtccctagcccagaacagagtctggcacacagcaggtactgaatgaatatgtgttcagtgaatattgtgggtgagatagaaggtgaatatccacatttccctttagaagtcacctgatctgggtttgagatctgcagggatctactccagacaggagaacgaataattccacctgtgctgatgagttggaaggatctagagggcttgagatctttccactggggtcagtgggggtgggtgcacctccaacacccttcttttctttgaacaagatttttccttaattccccaatactccctttgaatatatgattttagccaccatcatagcgaattgcatcgtcctcgcactggagcagcatctgcctgatgatgacaagaccccgatgtctgaacggctggtgagtgatgtcttttctcagggtcttctccttggctttagcaggacattaatttttgggggagtggagcagggcacagaggaggctctcagtcctggagcccagagccagatcatgggaagcctaaatttccttttcattttttcttgaaccagagtctcgctctgtcacccaggctggagtgcagtggttcagtcatagctcactgcagcctccacctcctgggctcaagccatcctcccactgcagcctcctgagtagcagggactacaggtgccaccatgcccagttaattttcttatttttatctttttttgtagagatggggatctcactaggttgcttaggctggtctcaaactgcccactttggcatctgacataatttcaggcagtatactcaaatgaacattgttaatgttaataattatgtcttggccagacactgtagctcatgcctgtaatcccagcagtttgggaggccaaggcaggtagatcacttgaggtcaagagttcgagaccatcctgaccaacatggtgaaagcccgtctctactaaaaaaatacaaaattagctggatatggtggtgcacacctgtaatcccagctacttgggaggctgaggcaggagaatcgcttgaacccgggaggcagaggttgcagtaagccaagatcgcaccattgcactccagtctgggcaacaggagtgaaactccatcttggtgggggggaggcgaaaaaaaagaaacaagaatattacaaaggatacagatgaagagatgcaaagggtgagatataggagaagggtgtggctggcagcttctaggtagcttcaggagggggactggtcaccagaaagaccaaggcatgattcgagggttgcgactttcagccccaccccccaacctctgggagggcagaggggctgaaaatcaagttgatcaccaacggtcaatgatttaaatccaaacctctaatcatgccttggttttcccggtgaccaacccccatcctgaagctacctagaagctgccagccatcagtcaatccttagcctgcaaaaagacatccctttggagatcccaagggttttaggagctgtacaccaggaaacagtgtcaaagaccaaacatacatttcacaatgtcacagtcttctaaaaactataactagcctagcaaacctatgatttctagatctttgcattttcacttaaaataaagctaaataaaaagcgtccattgaaagactggtaagcaagtagaagtaccagtggcaagctaatgtggaaaaaaaaaatcattcaggcagagtgaaaatgattgtagctcgagaaacgttgctgtaacagatgggaaaacattcacattggggctctgatggagaagagcttgtagcttaatttcaaatatgatagattagcagctggaagccagaaccagccggaggttctgcagaggaactggaggtgaggatactggccacttatcagccagtacagaagtcctattccaaacctttaacaatctacatgccagctgagaaccatcctaaggggtcagatttaggagtgaggtcaatgcacaagctctagcctcaaataccttgaacgctgcatgtgacaagtaaattctctaaaccaatgctttccattagaactttctgcagtcacagaaatgatctccatctgccctgtccaataggattgtcacttgaaatgtagccagtgtgactgcagaactgtgttttttattttattgcatttaaattaattttaattgaaatagccacatgtggcctgtgactgtcgtattgaataagacaggtgcaaacaaataattctgtttagctgagtgatatgtgaggttggcccaaaaggaatgaaggaggaaggtgccttctctaggcattggctttgctcgcaaaaggctttggacaagagaactctgcaagaggcagtgaggggtggtgagtgcaggagggtcaggggaagtgagagggtgataggtactgatttctaggtgggctggttccctgatcttgtcaacatctgcccagcccaagacgctgaccttgccttctctcccttccaggatgacacagaaccatacttcattggaattttttgtttcgaggctggaattaaaatcattgcccttgggtttgccttccacaaaggctcctacttgaggaatggctggaatgtcatggactttgtggtggtgctaacggggtaagtggcgcgtgctatacgctttggatttaactagctgaaggattacgaggcttttggttggtgtggtccgggccaggctcaggaaggctgagcccttgtgttctccctccccttgttatgcgcctgcctcctttctgccaacaccccacctccatgtctcagctgtatattacagcagatgctttctgttacaattaaaataatagctcattattgttggctgcttccagagtgctttatgcccattctctaatttaatccttgcaacaacccactgaattaggaaatattaatattcccatctgaccactgaggaatcagaaactcagagtgtaacttgcttaaggccacccagcaagtaagtgatggaactgggagatgaacagaagattatgcattccagaactcaaggttttaagtgttgtacgtgcatgggtctcttgatttgcttgaggatatcttgcttttatttcaacttggtgaatgttttttgagaatgtctgggtgcaagggattgtgattatgacaaaggagaaaagcaagctaaataaggtacagttactgtcttcaaggagttttcagatccatatatgatgaactgtggttgaaatgtgtatatgctttcctctaagcaccctgtatgaggtagcacttgctggtataacaaaagatccaaagctaggaaatgacttaaacacggcagaagtttatttgtcactcatagaaaattcaaaattgagctgggtgtggtggtgcatgcctgtaatctcagcactttgggaggctgaggtgggaggatcacttgagctcaggagttcaagaccagcttgggcaacacagtgagaccacccccccatctgtaaaacataaaataaaataaaaattaaccaggcatggtggtacatgcctgggagaattgcttgagctcaggagttggagggcacagtgagctatgatcatccaaccgtgctccagcctgggcaacagagcaagaccccatctcgaaaaaaaaaagtccaaaataattgttcctagttgacaggctcatctcctccaatgactgacggaccctgacccttgccatattgtggctcttcattgtcagcccacatcatccaataactccatgcttgtctgtatcaaaccaggaaggagaagtgagcatagaaggtgatacttggaaaggtttatgagtttggaaggggtgtgacccatacctgttccattcatatcctattggctagaactcggtcacatgaccacacatcactgcaagggaagctgggaagtatcagattgtgcttagaagaaaagggaaatggatttggagaatgacctactagtctgtcagggaccttaaaaacttttattagattccagtagggacattagtatctggtaccaatggctggttcctcctcttcccactctctactctcctctcagctaagtctgggctcttctattctaagacccttcttcactggacacctttttcatagtaatcatttacaggatcatagctttccatgttttgttgctgctccaggttctgtctctcttggcggatgtgatgggttgcagcacccacactgtgctggccgggctctcacaatgcagatttgtttcagagcaatgttgcctctcacagaaggagctgtggcctattgggctgtttctgtagaggccttcagatgtcagcagtctgttgtaaggactctgggctagctctcatgggcttgggtgttcacagagggatctttgttggctgtgctcacagttcggtggcttgggaccttggtgggttccaagggcatattatggtactgggcacttttctcttagtctactaggaaactcatctagaaacagcctagtggctaacttttttattgtttaaaaaatgtaaagctgggcagggtggctcatgcctgtatcccagcacattgggaggccaaggtgggaggattgcttgggcccaggagtttgagacgagcctgagcaacatagcaagaccacatctccacaaaataaaaattaaaagtgtataaagctgggtacagtggcacatgcctgtaaccccaattactcaggaggctggagagagaggattgcttgagcctaactagtttgagaccagcttgggtaacctagcaagatcccatgcaaaactaagtagagaataatagagcaaacacctgtgtatacattcatttattcaatgactatttattgaacacttctgtgtgccaggtcctgttctaggctctgggacacagcagtaaacaaaatagaaaaatcccctgtcctcatggagctgagagtctactgatggagatggacacaattgatgaatgaatctagtgtgtcagatggcggtgaggggtacagaggaaaaataaagcaggggagggatgggatgtgtggcaggcaggggtgaggggtgctggaagccagggaagacttcactgggcatgtgacatctgaatgaaaacctaagggaggtgagtgagtgagccatgaggagagctggaacagagtgtcaggcaaagggaacagccagtgcaaaggctctgaggctggactgtatctgacatgtttgatcaacagtaagaagacccacatggctagagaaggtgaccagaagaatggggagaattggggatagagaagtaatggagtaacctgctatcaaaacacaacctttctctttttttttttttttttttttttgacaagagtctccctctgtcacccaggctggagtgcagtggtacaatctcagctcactgcagcctctgcctcccagtttcaagtgattctcctgcctcagcctcccaagtagcttggattacaggcgtgtaccacaacatctagctaatttttgtatttttagtagagacgggtttacgccatgttggccaggctggtcttgaactcctgacctcaagtgatccacctggcatggcctcccaaagtgctgggattacaggcgtaagccactgtgcccagcaaaacaaaacctttctaacctttctaatccctgttttctccctccctagacccattcctttctctcccccatccaggggcactttcctgaattttatgtttattatttgcatttatgtattcacactttggctgcctaagtatataagaaatatatgctacctatttttacacttcaaaatattttttaaatagcatcagagtgagaatagtttacactttgactacatgcatagataagaaatatgtgggctgggaatggtggctcacacctgtaatcctagcaattttggaggcaaagatggaaggattactttaggccagaagtttgagaccagcctggccaatgtagtgaaaccctgtctctacaaaatgaaataaaatgtaataaaatattcagctgggcatggtggtgtgctcctgtggtcccagctactcaggaggccaaggcgggaggatcacttaagcccataaggtcgacgctgtagtgagctatgactgcactccagcttgggcaacagagcaagaccctgtccctaaaaaatgttttttgttgttgttgttgttttttgtttttttgtttttttaataaaggccaggtgtgatggctcacacttgtaagcctagcactttgagaggccagggcaggaagactgcttgagtccaggagtttaagaccagcctgggcaacatggtgaaaccccatctataaaaaaaatgcaaaaaattagccaggcatgatgacgcacgcctgtagtcccagctactcaggaggctgaggtgggaggatcacgtgagcccaggaggtcgaggctgcagtgatccgtgattgcaccactgcactccaggctgggcaacaaagtaagaccttgtctcaaaaaaataaaataaaataaaaaataaaaaaaagaaaagagaaagaaaaaaagagatatgtggtactgtttttcaaacttcacatttctctaacctgacttttgtgttcaacatgagataaatctgattaataaaaatagtttccatgcatccattttcatgactgcatagtattctgtggtaggagtatgctgccgtgtatttatctatttggattgtttccagctttgggctattttgacccaaagtgtccctgctttctcccaagtgagtttctctagggcacgtacccaggagtggaactgctgagttgtatactgtgtgcatcctcagccccactaggtattgccaaattgctctgcaaagtggttgtgccaattcatgctccctgggggctggcttctgctggctgaggctggcttgaccttgctggcaggaaggagccttaaaaatccctgtgtggttttttttgttttacttttattttaagtttaggggtacaagtgcagatctattacatgggtaaacttgtgtcttgggggtttgttgtacaggttatttcatcacccacgtattaagcctagtacccattagttatttttcttgatcatcttcctcctcccgccctccaccctccaaaaggccccagtgcgtgttgttcacctctgtatgtccatgtgttatcatcatttagcccccacttagaacacgcagtatttggttttctgtttctgcattagtttgctaaggataatggcctccagctccgtccgtgttcctgcaaaggacatgatcttgttctttttcttggctgcatagtattccatggtgtatatgtaccacattttctttatccagtctatcattgatgggcttttgcagccctgtttttttttttttttcataataacacggttatgggaacacttagggaagctcatatattattgagcagtgtgatggttaatattgagcatcaacttgatcagcttgaaggatgcaaagtcttgttcctgggtgtgtctgtgagggtgttgccaaaggagattaacatttgagccggtgaactaggagaggcagactcacccccaatctgtgtgggcaccatctaatcagctgccagtgtggccagaataaaagcaggcagaagaagttggaaagagtagacttgctgagtcttctggccttcatctttgtcctgtgctgaatgcttcctgccctctaaaatcagattccaagttcttcagcttttggactcatggacttacaccaatggttagccaggagctctcaggcctttggccacagactgaaggctgcactgtcagcttccctacttttgaggtttgaggactctgacggatccaccactggcttccttgctcttcatccttcagatgggctatcgtgggactttaccttgtgattgtgtgagtcaattctccttataaactccctttcatatatacatctatcctgttagttttgtccctctgaagaaccttgactaatacagacacctagtgggtcccaataagtgatcattaaactgaaggcagtcattcagtaggtcagtttgtcacttgtgtttgtatctccctgcttacaacaaggtggcctttcttctagtttcctgtcatctgatggaagagattctagactcattcctctagaggagaaatacttcatctagaacagataggtcctaagggtgagagctcatcgttgggatgaatgaacccactgaaattttatgcaagaagaaaattgtgtatatgtatatttttttttctggtctgtagtttttattagattctcagggaatcctgatcctatcatgaagaccttctattctagattgggttcctttcacatccccttctcctttcttgttgaattctccatgcatttctttcacttgcttttcttgctcttatttctctggtagtcagttatcctttttgtctggtggttctatctccttcaaatgaggcacattgctcaaattttattactccaaattccaaggtgctgtttagtgtcctgttgggttgtaagctaggaacagggaggggaaagtaaaacattctgcatgagctgggtgcagcgggcaagcacctggaattccagctactggaagctgaggtgggaggattccctgagcccaagggtttaaggccagcctgggcaacaaagtgagattttgtcttaaaaaaaaaaaaaatcccagctgggctctgtggctcatacctgtaatcccagcactttgggaggcagaggcgggcagatcgcttgaagtcaggagttccagaccagcctggccaacgtggtgaaaccccatctgtactaaaaatacaaaaaaaaaaaaaaaaaagcctggcatggtggtgtggtgtgcactggtaatcccagttatttgggaggctgaggcagcagaatcacttgaatccaggaggcagaggttgcagtgagctgagattgtgccactgcactccatcctggatgacagagtgagactctgtctcaaaaaaaaaaaaaaaaagaaagaaaaaacacgcgcgcacacacacacacatcatgcagacctagccttctgccaatgtcaatggtagagaaacacagtagacacttaattctatgtttcagagaggaggggactcaaatatattaatttgacattgagacagtgatgactttaatgagtactttctttcctttttttttttttttttttcgggacagagtgcagtggtgggattttggctcactgtagcctccacctcctgggttccagcagttctcctgcctcagcctcctgagtagctgggactacaggcatgcactgctgtgcctggctaatttttgtatttttagtagagacggggtttcacactatcagccagactggtctcgaactccggacctcaggtgatctgcccacctcggcctcccaaagtgctgggattacaggcatgagccaccgtgcccggcctaatgagtactttctgattaacctgttgccctctcagattcctgaagcaaaccacagcgttaaaacgtgattcattttgtgtggaccaccacggtgtttaccttcttcttgggtgaagtttggtggaaaagatcttaccccggacatctgtttgttctttgtaactcagagcctcagagaaatcctaactttataatgttgtcaaacccttgtaaggcatgtttttattgtatttgtgttctgatcatgaaactgaaaatgtgtaagaggaagatttcagaagcttggctgtatgtctgagatgacagttcttttactgtcattctcaaatatatataaatattgaagagatcaaataacacaaatcgtgcatgttaagaaaagagactgtgaacctcaccagagaggggtgagcacaattttttttcttttttattcacagggttagcactgtccctttcacataataaatgctcagtaaaataaatggttgttaagccggaaaagggtaacacttctgataatgagtgtcctgggaaatttactaagctgtttagaagatgggaccaacacactgatagaaatagtcagatagtccagaagtctatggcagatgccctgaacatcagatgagatataagacagagaagctctgggtctttgccagctctgacattttatgactctatgaaacggaaggttcctttttagaagggtctataaactgtctcaggctttgggccattttgttgaagatcagaggcaaggaaaagacacaactacacaggaaccatcagggaaagatgttgttttttggtcttgaagcatcattgaatttttttttttttttttgagacggagtttttctcttgttgcccaggctagagtgcaatggcatgatctcggctcactgcaacctccgcctcccaggttcaagtgattctcctgcctcagccttctgagtagctgggattacaggcatgtaccaccaagcccgggtaatttttttgtatgtttagtagagacgaggtttctccatgttggtcaggctagtctccaagtcctgccctcaggtggtccgcccacctctgtctcccaaagtgctgagattacaagcgtgagccaccgcaccgggccgcatcattggattttaaggctccatggattctggcaggtccagcccttctgttttactcacaaacaagtggtttgtccaaagtcacacagagatggtggcaagagatctagaataagaaggtgtcttcaagtcatggagccaggaaccctggctttttgggcaatggaagtggtataaatgtttaatatcacccctcaggttctgccactagagcccagctctctcttccttcctcttgccccctgactagcctatggcctctttccagagaataagaaagggatcctcagagaataatcccagttcctcgctttttattatatagttgaggaaaccaagtctcagaggggtcagtgtcttgaccatacacctctcatgtcctctctcctttttgattaattgaataaatacatgtagttgcttcttacctcctttctttcttcacccctgccccatgcacctgctcttagttgccttcacatgtaaacagcattccaacaacaacaacaaaacacaaccagcattctaactcatgagaccagcaacagttcctataaataccagcagcattttattttaatgtctctctgcagtagtttctcccctccatggatcagtcatccttggtaccaaaaggattccccactgtgacacaaatgctttttgtcattctcagtgagttataccattgagagagcatcgatctttttattgttcaaagcttttggttgtcatgatatttgctggaccatgtttcaccaggaaccacatcacttcctagcagcaggagctattttcttccatcttctaacaacaccagcagtgacagtgataataatgatgttagctgccatggtcgttattcttatcatttattgagtacttactatgtgccagggactacattaagagttttatgtgtattatcacattgagcctcgctagcctttgtacagatgaatctgaggctcagagaggttaagctgctcacaagggagtcacacagctggtaaggggtggatcaggatctcagcctctctgctaggacacttctctaaacctagaataatactgggcctgtgttaagttcagcaaagagctgtattcaacccagtgtccttaggaatgtaatgcctgttattaacaacagtggcaacattgataagctgaaacttatgaggtgcttacaatatgatatactatatattatatacatacataggcacccacctataatctcagcactttaggaggccaagtcaggaggatcacttgagcccaggagttcgagaccagcctgagcagcatagcaagatcctgtctctgtaaaaagtttattttttcagttggccaggtatgttggtacatgcctatagtcccagctaatgaggaggctgaggcaggaggattgcttgagcccaggaatttgaggctgcagtgaactatgatcacaccactgcactccagcctgggtgacagagcaagactgtctctaaaaataaaaataaaaataaaattatttcaactctcaaggttaaataaatactattattattcccatttacagatggagcaactgaggctcaaagacattaaatgcttactgtcttagtctgttttctgttgcttatagcagaacacctgaaactgagtaatttataaagaaaaagcaatttatttcttacagttatggagactggaaagtttaagatcaaggctgcatgagctataatgcacacacactattgcactccaggctgggtgacagggtgagaccccgtgtcaataaataataatataaaataaataaaacaaatttcaacatgagttttggaaggtttgaaatattcaagccagagcatctgtctcataagtggtggacccaggatttgaactaaggcagatctggatctagaacccattttcttgaatcctacgctatttctctaaggtcaagtttgccaaggaaaataaacttgagaatttgaatagagctctctgacatgggaagtcagggtgatccttccttcccctccctgatcttgggttccactatggctgggggaaaacaggagcagaagagatttcaagaaatgagagattggcctagcgccatggttaagacctggacttcagagtcagaggaagctcctccctctatgacagtgagaatgtgggttgaactcactgaacctcagttttctcacctggaaaaagggagtaaaactagtgcctagctcctagggtttgcatcacacacgaaagttggtgaactgaaggaaaaaaacttaaattcttgtgggggagcatgtgatagatgctacaaattctccatgccttatttacctagcttacgtctaagttcacctgcagcttcctcttggtacactcccatctctctacatctctgttggagggcagtctctggcatcacagagtttgctgagccagatgcttaacaacctcggtagcatccctcaaccagtgagctagggagtcagtgtataaataccctggcttccccattgctcagtgggaaaacactgaaatatgttatacagcatcatagaggtgcctcagtaaaattgaatcctagttgttcacataaaacccattcactagtgtaccctttaccaatctctctcttcctcattcctcacttgtaattccttgcattacctcccaaattaaccattggaccctagtttttgccttggggtctactcggcgctaactcaaggagcggaagttggaagcttagcgggttacaggtttcagcaccctggacagctcccagcacaccgtattgtgctaaaatgttctcttccctccctctgcctccagctggggtggagagggactgagtaaaggccagatggccaggtgaccttgttccatactgagcttcttggccattttccctgtggggctggagaagaccttgccatccatctctccgcaggtttgggggccgactgaggtcttgttttctcgaattgctatgacaaatgccagcctgcctccaaggggcatctgtcccactgcctctacagtttgcatgcctaatgactcctctcctctcaccagggcagggaggtggctgcctggtgggccgcttgaagccgggagaccaagatcatgccactggactcgcaacaaaccgagactcttttttttttttttttttcctcgagacagggtcttgctctgttgcccaggctggagtgcagtggcgcgatcttggctcactgcagcctccgcctcccaggttcaagcactcccacctcagcctcccaagtagctgggattacaggcgcacaccaccatgcctggctaatttttgcatttttagtagagagggggtttcaccatgttggccaggctgatctcgaacttctcccctcaggtgatccactcgccttggcctctcaaagtgctgggattgcagctgtgagccaccatgcctggccaacagaataggactctgtctcaaaaaataattttttttaaacattgctttgcaacccagctgcttcttgtgcaggcatctctaaatgaggacagccagtctacatagacacgtaaggaagcatagtggttaagacctggtctttggggttagagtggattcccaacctgactccactgtttccaagctgtgtgaccttgggcaagttactgtacctccctgaatcttccatttcttcatctggaaaatgagagtagtagcatcccctgacttggtggggcatggtggctgatgcttgtaatccaaacactttgggaagccaaggtgggtgaatcgcttaaacttgggagttcaaggccattctgggcaacatggtgaaactccatctctacaaaaacaaaacaaagcaaaaattatctgggtgtgatagtgtgtgcctgtaattccagctactcaggaggctgaggtgggagaatcacttgagcccaggaggtcaagtctgcagtgagccgtgcttgcaccactgcagtccaacagagcgagaccttgtctcaaacaaacaaaacaaaacacaaaacaacaacaaaatactaccaccttatggagttgttttcaaggttcaatgagttaatgtctgacccatgctgggctgggtttatggatgttacttgcccagggacagtctgaagaaagagaaagtgatatagtccattgggcctcagcttcctcatctgtggaatgggaataataattgcacctacctcaaaaggtaaaagtcagtgagatacatataaggcattcagaacaaaaactggcacagaataagtgctcaattatattagctattgtaagactaataactatcattataatgatgataataattattactacttccccaggcccagttccatagaccagttagttaactgtagggaacgtttgctattattagttgggttcccaatatctgacctccctttccaatttagggagaatcctcccctttctataaagtactgctggtctatgggatcccaccctcactaataagttgaaggtgaaagggattcattgtcaccccatcacctggtagtcagggcatgtgatttaaacaaccagggccaggcgcagtggctcacgcctgtaatcccagcactttgggacgccaaggcaggaggatagcttgagccaagcccaggagtttgagaccagactgggcaacatagtgagacccctatctcttaaaaattttttaattagctgggggtggtagcacaggcttgtagtccccgctactcaggaggctgaggcaggaggattgcttgagcccaggaggtcaaggctgcagtgagccgtgatagtgccactacactccagcccagcctgggcaacagggcaagatcctgtctcaaaaaacaaactaataaaaaactcaaccagtcacgttttcctacccaggaatttgaaaatggaccaagtgatccaaacatgatggtttggactctttcatggcctcctgctacaggagaaggtcaggctggctacattgttcctgctgatttcccaaatcccctcttctggccccctgttgattatctgagtttcctaaaaatcccttttatgcctaagatagccggtcagtgtttggttttgcaatcaagaacccagactgggccaggcacggtggcccacgcctgtaatcccagcactttgggaggccgaggcgggcagatcatgagatcaggagatcgagaccatcctggctaacgtggtgaaaccccgtctctactaaaaatacaaaacaaaaaaaaaaaaattagccaggcatgatggcggtcacctgtagtcccagctactggggaggctgaggcaggagaatggcgtgaacccgggaggcggagcttgcagtgagctgagatggcaccactgcactccagcctgggcgacagaacgagactccgtcaaaaaaaaaaaaagaaaaaagaagaacccagaacccagactgatcctgagacaaagatttgagggcaacgaatcacgaggtcaggaaatcgagaccatcctggctaacatggtgaaaccccgtctttattaaaaatacaacaaattagctgagcgtggtggtgggcgcctgtagtcccagctactcgggaggctgaggaaggagaatggcgtgaacctgggaggcggagcttgcaataagccaagatcgcaccactgcactccagcctgggtgacagagcaagactccatctcaaaaaaaaaaaaaaaaaatttgaggacaagtggtttgtttggcaataccaggaaacaggggaacaggatagtcagaaaagaaagagaaagctgggcatggtggctcactcctgtaatctcagcactttgggaggccaaggcaggtggatcacctgaggtcaggagtttgagaccagcctggccaacatggtgaaatcccgtctctgctaaaaatataaaaattagtcgggtgtggtggcgtgcacctataatcaaaataaaataaaatcaggatattttattttaaaactctgtcttagtgtaactcatatttacctcttctgtatgctcctttgcatcagttatatattgccataatacggctgtgtaacaaacaatccccaagacccagtggcttataatgacaagcatttatttagctcatgattctgaagggtggcagtttaggctgggcccagttgggtgctttatctggtctcagttgagctcattcatgcatctttggtcagctgcgggtcagctgggtggctcttctgtttggctgttagctggctgcagactggtccaggatgacctcggctggaatgactgtgctccactccctatggtctttcaccctccagcaggctagcctgagctagttcacatggcagcttttcatcctccagcaggctagcctgagctagttcacgtggcagcaatgggattctaagagaaagaggaagtgttcagccttcttaagggctagtcccaggaatggcacaacatcgtgttggccactgttgtccaaagcaagcaatgaagctggtccagattcaaggaatggggcaacagagcccatctggtatttacctggggccactggggccccattcctgttccctggggccttttgccctgacttctgtgggccctcagagcatattttcagattcctttccatccctgaccctcagcaatcaatgtagatgacgtgtcattactgtgtcacttgcacagagaaaaggaggaaaaaatgtcagcaaaaactctgctgagagcagagggcccatcatacagcaagctggaaagaaaagtgggaatgattacacagcctcctcagatgcttccagcttttatcaaatctcactgtgatatctgagttctgaaccctcacaggtggttggcgtgcaagggaagagatttcttgtctgccatgctgacatgcacagacacgcaacctggctccctctgtccactggggctttggattttgtttgttgaaatgttacccactcctgatcagagctggatggaaacctggctctgattccattggctcaggggctcaggtgggggcagaggccaggctggttgggtgtctatgtggagaccttaactcttctccctcccgccccaactctttttgtttctttttttttttttttttttttttgagatggggtttcactcttgttgcccaggctggagtgcagtggcgtgatcttggctcactgcaacttctgcctcctgggttcaagcaattctcccacctcagcctcctgagtagctgggattacaggagcacgccaccatacctggctaatttttgtatttttagtagagacagggtttcgccatgttggccaggctggtcttgaactcctgacctcaggtgatccaccctcctcagcctcccaaaatgctgggattagaggcgtgagccaccacacctggcccttttcttttcttagctgcctccacctctcttcccttctgcagtgttaggtttatggaaaccgaggccggcgtagagatcaacttcagagagcatgaactgagcatctgctgggtcttagatcctttacatagcttatcatcttcaaaccttctcacagttctgtgtggctagagccaggatttggacacagctctgccccactgtagaaccaggcttccttctgtccactgtcaaattttagagggagaaaatagggaaagggacaccagccttctccacgagcagcttctgcccactcaccccagggactttgcacatgctgtgtgcctgtgtctgagatatgctccctcctctgtatctgcttaattcttacccagacatgatacataaagtatttaacatccaggtggcagggacaccagctaacctgaaaagaggttcccctgttgtgccacatgtgtactcattgtttgctgcattgtgggggcagtccaggggccttgaagaggggccaaggtgccaaaggggcactctcaggcctcaaggaagtacatgtttactgatatgatactgtctcttcctccaggaaggaagccttccctgatctccccactgcatgcccactatgataccagtttaggtcccctctttatggccatctgtggcatcagtgtgaatcctcttaatgttgtctatttggttaatcatctgtctccttcctctggggggtaaagacagaaccacagagcctcgtgtagaacttgagaatggggttcagtaaaaatctgttgaatgcataaatgggtgattgagtgaatgaatgaatgagtgaatgaatgagtgagtggatgaatgaatgagtgaatgaatgagtgagtgaatgaatgaatgagtgaattaatgaatgaattcatagctgataatacaggcttcatggcttttgttaggcttgcccagacattgctaggggatggacagaaggaagaagagctatacttaattccagtcctgttgttctgtagcaggaggagaaaaacagggactgcccagcctgctctgggtggattcaggagcagctgaggttcctctcttatttgcaaacagggaattcaaaaagccccaacctcagaatcacactcgcctcagcagctgtaccagccaaggggacaatgtgggaagccttgggcaccaggaatgctgagtgcttcgaaaaagcgaaggctcagggaacaatccctgatttttcattcccttgtcctttctgaagaaacaggcaaaggcaggccaggcacggtggctcacacctgtaatcccaacactttaggaggccgaggctggtgaatcacttgaggtcaggagttcaagaccagcgtagccaacatcatgaaatcccatctctactaaaaatacaaaaattagctgggtttggtggtgcatccctgtaatctcagctactcgggaggctgaggcatgagaatcacctgaactggggaggtggaggttgcagtgagctgagtctgcgccactgcactccagcctggatgacagagtgagactccatcttaaaacaaaacaaaacaaaaacaagtaaagccttgtgtgtttttaaattgtaggttcagcagcaaagctctgtaataaggagctggaccctgcagtcagacagtcatgggcttctccagtgcccagccgagtgacccgagggagttatgataaacaccaacattcatccacaatttgtacctagtgctattctcaatatcttgagtaaattatctcatttaatcctccaggcacatctttcttggtaggtgccgtcattgtccccagtgtacatctgggaaaatgaggacaggctggcagagcacccttcctgctcacctctgctgctctgctgacctctggcaagactgttgtctctctgagcctcagtttccccatctgaaaattggggcctgtattagcccgttctcacattgctataacgagatgcttggctggggctgggcgtgatggcttatgcttgtaatcccagcactttgggaggctgagttgggcagattgggagtgtgagaccagcttgggcaatatagcaagaccccatctcttctaaaaaaaaaaaaaaattagccaggcatggtgatatgcacctgtaattccagctacccaggaggctgaggcaggagaattgcttgaacccaggaggcagaggttgcagtgagccaagattgcgccactgcactccagcctgggagacagagtgagactccatctcaaaaaacaaattatttttaaaaaattaaaaaaaaaaatgcctggctgggcacagtggctcacacccataatcccagtactttgggaggccaaggtgggaagattgcttgagcccaggagttccagaccagcctgggcaacacagtgaaatcctgtctctactaaaagtacaaaaattagccaggtgtggtggcacgcgcctgtggtcccagctactcaggagggtgaggtgggaggattgcttaagcctgggaggtcaaggctgcagtgagcaatgattatgccactgcactccagcctgggcgacagagtgagaccttgtaaaaataataataataataataaataaataaaaaccctgagactggggtaatttataaagaaaagaggtttaattgactcacgattctgcaggctctacagaaagcatggcagcatctgctcagcttctgggaaggcctcaggaaacttacaatcatggcagaaggtaaagctggagcaggtgtcctcacatggccagaacaggaggaagagagagagtggggagatgctacacacctttaaatgtccaatctcacaagaactcactcacgatctcgagaatagcaccaaggcggaaatctgcccccatgatccaattaccttccaccaggccccacctccaacattggggattacaattcgccataagatttggttgcggacagacacagatccaaagtacattaaaagtaatggcaaaaaccacaattacttttgcaccaacctaatatctcaggggctcattgtacctatttcacaggacaaatgaaggtatcagtaataacagtagcctgtagtcccagctattcaggaggccgagacaggaggatcacttgaacccaggaggtcgaggctgcagtgagctatgatcacgccactgcactgcaccctgggtgacagggcgaaaacttatctctaaaaataataataacaacaacaatagtgaacacagatataacatgtgtgtggccaggctgtgcccttagggctttgcagggattatttcattcactctcaatctccccattttacagatgagaaaactgacgttcagaaaagctagaggacttgccccaagccacacggctaggaagtggtggaattggggtttaaatgaggaagcttgacttcagtgtcgaagctcttaactgccacactcaatacatggagtagaggttgctgattctgtgattatctgattctggaaagtaaagaccctgtttccagacgtttgctgcttgacttagttcccaggggatggccactggatgatgcagtgttgcccaggagaggttagctagacacactgcaaccattccattgctaatacttatacttgctcttgttctgctgggtgctatgcagggaagggctgtctgagccctttgcaagaattctcccattggtgcctcccagagattctgaggttggggctttttgcatcccttattagcagatgagacaccaaagcccaggtcaataatctgacctgcatcccccgcctaccagccagaccaaggtcacttccccacaatgcaggccctgatccaaggctctgggtgcaaaccagtttccatgtccctgggggtccatcttcttcagctgactttttttttttttttttttttttgagacagcgtcttgctttgttgccgaggctggagtgcagtggtgtgatcatggcttattgcagccttgacctcccaggctcaagcaatcctcccacgtcagcctcctgagtagctaggactatgggcacacgccatgatgcctgggtaatttttttttttttttttttgagacagagtctcgcactgtagcccaggctggagtgcagtggcgcaatctcggctcactgcaagccccatctcccaggttcatgccattctcctgcctcagcctctcgagtagctgggattacaggtgcctgctacctcgcctggctaattttttgtatttttagtagagacggggtttcaccgtgttagccaggatggtctccatctcctgacttcgtgatccgcccacctcagcctcccaaagcgctgggattacaggcatgagccagatgcctggctaatttttaagtttttttataaaggcggggtcttgctatgttgcccaagctggtctcaaactcctggcctcaaaaagtcttcctgcctcagcctcccaaagtgctaggattacagacatgagccactgcacccagcctgactttttttctaactgaaaaattaattatatatattcatggagtacaatgggatgttctgatatatgtttacatttttgaatgattaaatcaagccaattaacatatccactacatcgcatacttattttttgtggtgagaacgcttaaaatctactcttttagcaattttgaaatatacaataccttatgttgtatattacattatgttgtatagtacgttgaaacatacactacaatacgttatcattaattgtggtcaccatgctgtgcaaaagatctctaaaacgtattcctcctgtctgactgaaactttgtatcctttgcctaatatctccccaatccctccaccaccagcccctggtaaccaccattctctctgcttccatgggttcaaattttttattttttgaaatttttaatttttatttatttatttatttatttatttatttatttttgagatggagtctcgctctgtcacccagtctggagtgcaatggtgccatcttggctcactgcaacctccgcctcctgggttcaagcgattctccagcctcagcctcccgagtagctggggttacaggtgcttgccaccaggcccggctaatttttgtatttttagtagagacggggtttcaccatgttggctaggctggtctggaactcctgacctccagtgatccacccacctcggcctcccaaagtgctgagattacaagcgttgagccactgcacctggcctaaaatttttttttttttttttttttttgagacggagtctcactctcttgctaggctggagtgcagtggcatgatctcagcccactgcaacctcagcctcccgggttcaagcgattctcctgcctcagcctcctgagtagctgggactagaggtgtgcaccaccacgcccagctaatttttgtatttttagtagggacagggtttcaccatgttggccaggatggtgtcaatctcttgatctcgtgatctgcctgcctcgggcttccaaagtgatgggattatgggccaccacgcccggcctcaaattttttagagctcacatataagcgagattgtgtactatttgcgtttctgtgtctggcttgtttcatcttagtataatgtcctccaggttcatgcacgttgtcgcaaaagatggaatttgctcctttttaaagactgaatagtacttcattgtgtacatatacacgccatattttcttcatccattcctttactgatggacatttgggttgtacctgcatcttggctattgtgaagagtgctgtcatgaacatgggtgtgcagctgactctgaggtgttagagggattacagctcctccaaaagaccaccgtcacccaaacctgctcctcctgccctattttctgtttaggtaaaggcggctttaaccccctgcagtgctctggcctcagacctccagatcttcctctatgcctctatgcctctttttctccaccccctgcatccaatctgttagcacatcttattggctctaccttcagaatctacccagaatccaccacccacctctcaccaccttcacagccccaccccggtccagcccccatctttgctggcctggactaaaccagttgcccctccaccccaatctggtctcttaacttcagtccttgccccacccccaggactgttccccacacagcagccagagggcacctgtgagccactgagtcaggacctggctcctctttgctcacaacctcacttggagaaaaagcccaaattctcctcacagggacccacaaactctgcccctgtgatcccccatccccctctattcccactctcctctccactcactcggcttcagctacacaagttccctgctgtcccttacacaccaagcactccccagcctcagggcctttgcacaggctgttccctctgcctggaacactcttcccccagatatctgcttggctcccccctcacttcctttgggtctttgctcaagtgtccttctaacatgtaactgcctcacctgcactgtgccaccccactccccgcctctaggcttaatttccctctacacccctgaagagcatctgccaagctatatttacttgtttattggttattgccaatcccctgcccccactagaatgccagctccatgagggcagggacttctgtctgttttgttcactgctattcccccagagcctagaacacagcctggcacatagtaagtattcactaaataatttgtaatatgaattgtgccagtaaaatcttccaggggcatcaagcccctgccatgactaggtggtaacatcctcaccccctgtccatgtgctatctcctcctgacctgcttgtctcattgttctaatggtggctcacgcctgtaatcccagcacttggggaggccgaggcgggcagatacctgagttcaggagtttgagaccagcctggccaacatgatgaaaccctgtctctactaaaaatacaaaaattagctgggcgtggcattgcacgcctgtagtcctagctactcgagaggctgaggcaggagaatcgcttgaacccgggaggtggaggttgcagtgagctgagatcatgccattgcaatccagcctgggccacaagagcgaaactctgtctcaaaaaatatatatatatatttcattgtggtaacatatgcataacataaaatgtaccattttttaagtgtttagttgagcggcgttaagtacattcatattgttgtgcaaccaggaccgccatccatctccagaacttttgcatcttgcaaaactgaagctctgcccccaggaaactctcactccccgctcccccttcccctctccccgactcccccttcccccctccccactccccccaccctactccacactccccactcccccagcccctggcacccgccgttctagtttctatctctgtgaatttggctactttgggtcccccctgtgagtagaatcatacagtatttgtctttttgtgactggtttgtttcgtggagcataatgtcctccagtctcatccatattgtagcatgagtcagaatttccttcttttccaggccgaatcgtattccattgtgtggatggaccacactttgcttatctgttcatccagatgggcacttggcttccaccttttggctattgtaaataatgctgctgtaaacctgtgtgtacaaatagctgagtccctgctttcaattcttttggatatagacccagaagtggaattttttttaaatcaagatttgacccactggggcccttagaggtctcattggctctgaagcttttttttttttttttttttggacgctttgaaactaaaaataggagtgaggggcacagtgaggggggcacacatctctcgtgtcagcgttttttaaaaacaccccgggaggaagatgtgtgaaatccctcccttccccccgctcccaccccctccaagatctcaaaatacctcttgttttaggaagcggctgtgacatcaggcaggcagcgtgtggcatctgagacacaatatcgcaagtggctgggagcccagagaaaccaggacaggcgtgctggggatgtggactagagatggagctaattttagtggctgaagaggctgcaagaagagagagaaagaggggtgtgtgtgtgtgtgtgtgtgtgtgtgtgtgtgtgtgtgtacgcacagtgatagaggctggagggggagaaatgacagataaatcagcttgggcaaagaaagctaatgggcagaggagcgagacccagctcagaaggtggtcagcaaatctaaagatgtgtgcccgagggtcaaggtggtggggggattcataggcaagtggtagagaggctattccatttgcagaggctctctctgtttgaggcgtgattcacctgtgccgtcctcaaggccattctgagaacaccactgttgttttcctccttttatgagtagggaaactgaggcattgaactgcttctattcttcagtaagaagcagggggaacatatggtagaagcaaagaaatacaaacatgagggctctcggggtctacgtgattggctgtgacatccatgagagcggatcgcaggttgaaggaaacactggtggcagaaagtagctgaacatttggatttgggaatcccagtggacgtggcgaaaattctggcttttcccttcacaggctgcggggccactctgacctgcggtttccttatctgtgaaatggaacgatgccacctgtctcagcgttgttttgaggatgcgaggagatgatccgtgtaatatgcccactagggggcctgctccagggtagattctcagcaaatggtagtcatggtttttgttacatttggggatattggcaggtaaaaaggaaatacttcattcattccaaaattgctcactgaggttctactatgtgctaggccctgatgacacatcggtcaacaagacaggcctgctttctgcccttgtaaaacttcagttcaactgcattgcactcatcagcctaataatccaggtaaattgtgatgagaataacaactagcatttactatgagccctttacaaatattaacccatttaatcttctaaagagcctataagataagagctcttgccctgcgcagtggctcacgcctataatcccagcacgtcgtgaggccaaggcaggtggatcacctgaggtcaggagttcaagaatagcctgaccaacagggtgaaaccctgtctctgctaataatacaaaaattagccaggcatggtggcaggtgcctgtaatcccagctacttggctgaggtaggagaatcgcttgaacccaggaggcggaggttgcagtgagtcgagatcactccactgcactccaagagtgaaactctgtcacacacacaaaaaaaaacaacctgttattatccacattttacctatgaggaaaccgatgcccagagaggttaagtaactgtccaaaggtcacacagctacggagtggtagagctgggattcagacccaggagtgtgatcccagagtgtgtgtgtatgtttgtttgtttgtttgtttgtttgtttgtttttaccactgtgttttcctgcttctgcaatagaagtaatcaccagtaacactgagcagttgttatgtgccatgcccttaacacacatctccttggatctttggaaagaatcctaaaagggttgtttttcatgatccacattttatggagagagagagatcaaagcatagagagaggaagtaacttgcccaagatcctgcagctgaagactctagggttgcaaatttgggacggccctggaccctgcattccagcttctagcagctcatagggggaactctttatttatttatttatttatttatttatttatttatttattttgagatggagtttcgctcttcttgcccagcctggaatgcaatggcatgatctcggctcactgcaacctccgcctcctgggttcaagtgattctcctgcctcagcctcctgagtagctgagattacaggcatatgccaccacgcctggctaatttaattttttttagtagagacggggtttctccatgttggtcaggctggtctcgaactcctgacctcaggtgatccgcccatctcggccccccaaagtgctaggaatacaggcctgagccaccacgcatgccctgggggggaccacttttatcggtgcatttcttccattttccctgtgtctgtgtaaagataaacacccccaagccccttgactatgaactgtgggccataattagttaatggaaggtaaatgttttagagacggaaattgctgtgccatttttccccgctaggcattgttgcctgcatgctaatgcaacacaatgtgcctttcttctgtcaggcatttttagacaaattctattttccctaaaatattttgccaaagaaaatagcaaatggggaagacattcagaggctcaggcagagagaggacaccattcccttgggtttaaacagaatggcagagtggataacagcacagatcttgagttaggtggatgccaatttgtgatttatttcccagcaaaccaagatgctggctctctgtgtgcctcagtttacttatttgtcaaatgaggagaataatggtacctgtctctcaccagcttaccagttgcctctttagctatgtctaatctgctattaaccacgcccactatgtctttaattccaagtattagaattgttttcttcctacaagctgtctgatcttttttaatcctgcttcatcttttgcagtattgttttcctacagcaggatttctcaaccttggcacaattgacattttgggctaggtaattcttggccgtgagctaccaccctgtgctaagatacttagagcatccctggcctctcaccctactaaatgccagtagcagcccctccccagttgtggcagccaaaaatggctcagacattgccaaacgaaatgtcccatggagggtagaaacgcccccacttgagaattgttctataggtattttcaagcatgtcttacatttctttaagtataatatgcaaaagaaaaggctaaatctaaaaaaagcccataatatgcgaagaatttttataatcagtgtccaataacttaagtatctaaaattgttatggctttttttctgctgtctcttgtttcctgtgattcctcattctggtgccttgttttcttgaatgtcttgttatctttggttgtgtgaagctcattttccatgggacactattttttgttttgttttgttttgagacagagtctcgcttggttgcccaggctggagtgcagtggtgcaatatcagttcactacaacctcagcctcccaggcccaaatgattctcctgcctcagcctcctgagtagctgggattacaggcgtgtgccaccacacccagctaatttttttgtatttttagtagaggcagggtttcaccacgttggccaggctggttttgaactcctgacctcaagtgatcaacccgcctcggccccccaaagtgctgggattacaggtgtgagccaccgtgcccggcatccatgggacactgttgaagggagttcattgaggcctgcgatgaaggcgaaccctccatggacaatttgcatttactttttccaggtgtctgggaaactcccagtctaggaccatcttagacttttagaccaacaatgtgttgagaatttaggtcaccagtgtctgcaaaagccagcttgtggttataatttctcaaaaacttttgtttttctccttttctgcaaagtgccaaagtaacttcctcaaaaatctctgggaatggaaagacgggagtaaattaacttcaggtttcttacctgaaagtgatagcctattggggccccatcctacttggggagtggtgtgtctcctttgagactttctaacacgtgtgtaccctggactttgccccacccctgctccctaggaggccataaaacttgaagcagcagttccatgggttagacagatgcccttggggcaaaagtggttttaatgctctggtagatgctcaggttacctctgggaaattcttgacttcacttatttatttggggctgataactactaattgtcaggcctttcttgtttcaacaacatggacttcagattttatgcaggatttgtcatcgttttcagcaagagagtcagtcttattacccagcttactgcattagaaatagatgtctgggccaggcgcagtggctcacacctgtaatcccagctgtttgggaggctaaggtgggcggatcatgaggtcaggagttcgagaccagcctggccaacatggtaaaaccccatctatactaaagatagaaaaaattagctgggtgtggtggtgcgtgcctgtaatcccagctacttgggaggctgaggcaggagaattgcttgaacccgggaggcagaggttgcagtgagccaagatcgcaccactgcactccagcctgggtgacaggacgagactctgtctcaaaaaaagaaatagatgtctgttgtgtggattatttaaaagagtagatggccaagaactatgacttatgcctgtcatctcagcactttgagaggctaaggtggagggatcacttgaggccatgagttagagaccagcctgggaaacatagcaagacccccatctctgcaaaagtaaaataaaataagttagtgtgcatgatggtgcaggcatacctctagtcctagctactcaggaggctgaggcaggaggatcacttgagcctaggagtttgaggctacagtgatctatgatcatgccactgcactccagcctgggtgacagatcaagaccctgcctctaaaacataaaaataaatacaaattaagttaaaaaataaaataaataagtaatagaacatccagcacagttcttggcatgcattgactgttgttgtttgtttgtttgtttgtttgtgacggagtctcactcttgttgcccaggctggagtgcaatggcatgatcttggctcatcataacttccacctcccaggttcaggtgattctcctacttcagcctcctgagtagctgggattacaggcacgtgccaccactcctagctgttttgttttgtttgtttgtttgttttgtatttttagtagagatggggtttctccaagttggtcaggctggtctcaaactcctgacctcaggcgatctgccagcctcggcctcccaaagtgctgagattacagacgtaagccaccacgcctggccagctgttttgattgttaaatgaaggtggtatgaaagggaaggaagaacagtgacatttgcaagggacactccctggagggcagggcaagggggctgtggaggggagaagtcagagagtatgatacaggttgccttgggtgatgttttagattttagccaacattggcaaagagcctcatttatctctcagagtagctctggctactggaaatgctgcacaacttcaggcggactttctagaagaaaactcttggccaggtgcagtgactcacacctgtaatcccaacactttgggaggctgaggcaggtggatcacttgagctcaagagtttgagaccagactgggcaacgtggcaaaacctcatctctacaaaaaaaaatacaaaaattaaccaggcgtggtggtgcatgcctgtatcccagctacttgggaggctgaggtgggaggattgcttgagcctggggaggtggaggtggtagtgagccaagattgcaccactgcactcccatttgagtgacagagcaagaccttgtctcaaaaaagaaaaaaagaaaagaaaagaaaagaaaattctctctgggattcaatcctggcccacacagcattggcttcacttcacctccttctcccctgagatacacagcaccattcccccaagcttcatcaacttaatctctgatctgggtgctgtgacttgtccccattcctggccagaatttaaggtagggatgaacccactagccctccatcacgcactctgccataaaagcacaccacgtgctgattgctgtctttggtctcctttctgccttgccctctagactctgagctgcttggagacagaggccagttttgtccatctccaaatcccctaaagtcctgtggccagcaagcaggtaggacatctgaaagttcgtcagagagggaattgcttttctcttgagatgcaactagaacaagaatcttattgacctggagtagcttcaaggttgtaagagtatgtgtcagggttctccaagaccactctcaggtttgaaggtttgctaaaagggctcacgggacccagaaaagctgtgaaattcagttatggtttattacagtggaagaatacagataatacagattaaaatctgcaaagcaaaagatgcacaaggcaatgtccaggggagatcaggcatgagcttccagctgttcactcccagtggagttatgcaaacagtgctcaattctcccagcaatggtgtgtgacaatgtacagtgtaccgccaaccagagaagctcacctgagccttggtgtccagggtttttattggggctcagttacattgacatggagcacccatgtgactgactttaactgctgggtctccagcacactccaagatcaaactgataccgtgtgtcccagggccccagctgaacacaaacaggcagtcaccatagatcccattgtgagcataagctaccaggcatggcccaaagccctagatatacagatattctttccaggagccagccaagggccagtccttcctttggaatatgcagagtttgaactccccaaccccaaggagttaactctttactacacagaatataaatctcaccaagtctttcttcttgtcaagtcctctcaaggtgacccattgcttttagcagtgtctttgagaccctgcgtcatctggccttgacccatatcacctgtgttatctctccactctagctacattgaacttttcttttttgagatgtggtctcactccatcacccaggctgaagtgcagtggtacagtcacagctcactgcagcctcaaactcctgggctcaagtgatcctcccacctcagcctcctgagtagctgagcccacaggtgcatgccattacacccagctaatatttttatttttagtaaagatgggttctcactatgtttcccaggttggtctcaaactcctgggctcaagcagtcctcccatcttggcctcccaaagtattggcattacaggggttagccaccacatccagcccattgaactttttaaggatcccctagcatcctatactttctgtcactggatagccttggaattatttttccttctttttgaaatactcttcttctttccaccctttgctgtcaagtctcagaataggcattatttcctccaaaaaccctctcctgaccctccaaatctggatgaggacacttcctttgcccagagagcacctgttttaatcctctcaggtggctataataaaataccttaaactgggtggcttatacacctcagaaatttattttccacagttctggaggctgggaagatcaaggcactgacagatttggtgtctgatgaggggccatttcttgtttcgtagaaggggtcttcctactgcatctttccatggtgaaaagagttgaggcagctctctgaaacctctttcatgagagcatgaatccctctgtcttcatgatctaatcacctcccaaaggccccacttcctaatatcttcacattggtgactaggtttcaacatatgaatttgagaaagacacagacattcagaccatagcagtgctcttccaccaggttttttatccccctgtattataattgaggtttaaattatctgctttccttcccttagattgtaagctccatgagagcagggccctacccatccagtcattgtcctatcccccatgactacaacttcctgggtacataattaatatttattatattatgtagcaaaggtatgctgccatactaagagacccaaaaggccaccggattaaaaccttaaagaaaaaaaaataatttctctcctataatagctgcaaggttagccatgcaggttggcagggaagctcacttccacaaagtcactcagggattcaggctcctgttgccctcttcttttctaccaccaaatgatcttcagcaccatttgcacaatcaaaacttaactggtcttgaataggcagaccttgaatttctgaagtctcagacccaaaagtggcagctgtcacttccactgacatatcactgatggaaacttaatcatgtgatcataccaaactgctagggatgctgggaaatgtagttttgttgggaactccatgacttggctaaaattccattactgtagaagatggtgggggatgggggagtggtggacatccagtggttgctaccatatttattgaatcaaattgtcaaacaggacctatctgataaggggttcttttccagaattaactgaagtattaaatcaggggcaaaggcatgtcacctcatctttctctccctatattggctttctagggctgttataacagagtaacatgaacttggcggcttaaaacaacagaaatttattttctcttagttctggaggctagaagcctaaaatcaaggtgtcagcagagccaccttgacaactgctctaggaaagaattcttccttgcctcttctggtggctcctggcaacccttggtattctttgtctggcatccacttcaatctctgcctccatcttcatttgccttttttctctgtgtgtctatgtcctttcctcttcttagaaggataccagtcattgaatttagggcttactctaaatccaggatgatctcacctcaagatccttaattagttacatctgcaaagagcttatttcaaaacaagattgcattctgaggtttcggtaaacacgaatttgggggaaatagtattcaactcaattcactgctttacttaagaaaagagaccatgaagtgagcctccttctgcttgagagagagagcgagcctttctgtgcaataggtcaatgaatggatgcagctgaattccacataactttataaaaatagatggccagcccatggggtttgctgacccctgcccaaaaattccaaagtcaacagcagtctcttttttaatcatttctctattttttaatttatttttatttttatgttgagatagagtcccgctctgtcgcccaggctggagtgtagtagtctcggctcactgcaacctctaccttccagatacaagtgattctcctgcctcagtctcctgagtggctaggagtacaggtgtccgccaccatacccagctaatttttgtatttttaatagaaacagggtttcaccatgttggccaggctggtctcgaactcctgacctcaagtggtccacccacctcggcctcccaaagtgctgggattacaggcatgagccaccatgcccggccaggattttcttcattttaacagcattcttacttgtcccacatccattctatcctgggtctaattagataacaaaatctacagatcttgtttaactgacattgtcctgggggatactttttatcttttgagacaaggtctcactctgttacccaggctggagtgcagtggcctgataacagctcactgcagcctcgaccacctgggttcaagcgatcctcccacctcagcctccagagtagctggaaccacagatgcatgccaccacacctggctaatttttaaatttcttgtagaggtggggtctccctatgttaccaaaggctggtctcaaactcctgggctcaaaagagcctcccaccttaacctcccaaagtgctgggattacagatatgagccactgtttccagccttggaaatatagtctaagaactgagtcaataggcgattttgtcattgtgtggacatcatgtagagaacttaacacaaacctagatggtataaactactgcacacctcagttatggggcataccctattgcacctaggctgcaaacctgcacagcaggttactgtcttgaatactgtaggcagttgtaacacaatggtaagtatttgtgtatctaaacatatctaggccgggcacggtggctcacgcctgtaattccagatcacctgaggtcaggagttcgagcccagcctggccaacatggcgaaactccttctttactgaaaaatgcaaaaattagccaggtgtggtggcaggcacctgtaatcccagctattcgggaggctgaggcaggagaatcgcttgaacctgggaggtggaggttgcagtgagctgagatcatgccactgcactccagcctgggtgacagagcaaaactccatctcaaaaaaataaaaaataaaaaacatatctaaacagaaaaggtacagtaaaaatacagttataaccatatgggaccaccattgtataggcagtccgctgttgatcaaaacatatcaaaacatcgttatgtagcacatgactgtaccataaaccacacggcttcaaacaagggaaatgtattctctcactgttttggaggccataggtctgaaatcgaggtgtcaccagggtccctccaaaggatccgggggaggatccttccattggatttggagttgcttcactccagtctctgcctcagtggtgacagggcgttctcctcttccctctcaaagttccctcttctgctgtgtcataaggatacatatgactgcatttaggccccactcagaaaatccaggaataaactcttgccctcatattcttaactaaatcgtacctgcataccttattttttctaaataaggtagcattccagggattaggacatcaacataacttctggagggttcactgttcaacccactacagccagaatgcgctttgaattcaggttctgacatctgggactgcctcccacgtacacacaccactaccttgtactgaatgcctgaagggttctgcccccacctccactcccccaaatatttgctgtggacctgagaaagctgacttcatggaagcttcattccattgttctaaggacttttcatacattaacaaatgtcttctctctatggggaaaaccacagagaaatcaagacagagtggggttaagtaactcacctgaggaggaacagtaagtggcagagccaggattcaaaccaacatggttttgcacagttttgacatcatttgcaacacaaatattgtcacagatacctttttgagcatctactgtgctaaccgccaggaaggaaaagaacatggggccgggagagctcttgacaggggacagggctggccatggaggtctgtgtcttggtggaagatgctatggttctctttttttttttttttttttgagatggagtcttgctctgtcacccaggctggagtgcagtagtgcaatcttagctcacagcaacctccacctcccgggttcaagcgattctcctgcctcagcctcccaaatatctgggattataggcacacaccaccacgcccagctaatttttgtatttttagtagagatggggtttcaccatgtgggccaggctggtctcgatctcctgaccttgttgtgatccacccgcctcggtctcccaaagtgctgggattacaggcatgagccaccacactgggcaactatggttctcttttaactccttgtgctgaaattattgcagaagcccaggccagttcatccccagaaagtgaggcataaacaggcagagctctacagaaacagagaatccacgactggtttgatggaggctgcctcactacctacagaatgggctctgggtggattgttctatctggggagccagcccacccaccagtctcagcccttggcgactctttcctgctgtcacagcagctggacattcagaaaccgaaacatgacagccttccctccctgttcctgcccagtggagtggaaacccctcgggacccacataccgagcgtgcacagcagcacagagttgcacagttaacacagcgcttcttctccagccctccggatgcaagctgacagattggcagctggctgacttccaaggtccagtgagttcttggcagtcgctttctgacctggacgagtggctgccacctcctggaacatcaggctgcccccttggggagagggtgacggtctctctggaaagactgtgagctttgaggtggtcatcaaaagccattcttggaaacattctttgagctgtaccgtgcaattcggtcaccaattgcacgtatttggatattaatatccgtatgtggatattaaattggttttgggttttgttttgttttgattgtggcaaaatatacacaacaatcctcctgcctcagcctcccaagtagctacaggcatgcaccaccatacccagctaatttttggattttttaaatttgtttgtttgtttttgttttttgagatggagtgtagcactgttgcctgggctggagtgcagtggcgcgatctcagctcactgccacctccgcctcctggattcaagtgattctcttgcctcagcctcctgagtagctgggattacaggcgcccgccaacacgcccagctaattttttgtatttttagtagagatgaggttttaccatgtcggccaggcttgtctcgaactcctgaccttgtgatccacccgcctcagcctcccaaagtgctgggattacaggtgtgagccaccgcgcccggccgatttttgtagttttagtagagacagggtttcaccatgttggctaggctggtcccgaattcctgatctcaggtgatccaccgcctcggcctcccgaagtgctaggattacaggcatgagccaccgcacacagcctaaatgctgtgcctcacgcctgtaatcccaacactttggtaagctgaggccagaggattgcttgagcccaggagtttgagaccagcctgggcaacataggaagaccccatctctataaaaaataaaaataaattagccaggcgtggtggtgcaggcctgtggtcccagctactcgggaggatgaggcaggaggatcgcttgagcccaagaggtcaaggctgcagtgagctgtgattgtgccactgcactccagcatgggtgaaagagcaagaccttgtctcaaaaaaaattaagcgaaatttaaaattctgtttctcactcacacaggctgcacttcaagtgcttaatcatcccttgtgggtggtggctatcatattggacagcatggatagagaatatttttatcagcgtaggaagcttcatcagagaggaccgctcagaggcctgtggggaccagcacagtgcagtagaagacacaggccagctggtgagagactggtcttctgatcccagatctgtccctcacttgctaggtgaccttggacagctccctcagtccctctggagttttctcttcattgttaaatcaggaaattggcctcagtgaattctgaggccccatctacttttttttttttttttttttttttttttttaattgagacagagtctcgctctgttgaccaggctggagtgcagtggcatgatcttggctcactgtaacctccgcctcccaggttcaagcaattctctgcctcatcctccccagtagctgggactacaggcgtgcaccaccatgcctgggtaatttttgtgttttcagtagagaccgggttttgccatgttggccaggctggtctcaaactcccaaccttgagtgatcctcccgcctcggcctcccaaagtgctgggattacaggtgtgagccaccacgcctggcctcatctagttctaaatgttatgacccactcagctctgaagacaagggaggaacatcctctcagtctagctctgacatgcagaagcctctcaccctgtcccccaggtcataaaggcaggcgtgttgtgaagagcacagaatgggctgagaaaaatatgcagggattgcgtctatctcccttccttccgcacgtttccttgtcggcaccacctgcctctattccgcgccgcacacacacccgccttctctctgtctcggaggaagacaggatcttccatcccccaaatcctgccctgattcctactctgaagcctctgccctgactcctttaagctccctgggaatacagcccatctcctatgccctcctcatcccagtagttcctaccttccccaaaatcgctttgggaaagtcccccaatgagtaaccagctgtcctacatgggcatctcagaacttctcttctgttgttgttgttgtttgttttgcttttgttttgagacaggatctctctttttcacccaggctcgagtgcagaggtgtgatctcagctcactgtagccttgacctcccaggctcaggcgatcctcccccctcagcctctggaatagctgggactacaggcacacgccaccacacccgggcaaattttttttaggacttttggtagaaatggagtttcgccgtgttgcccaggctggtctctaactcctgggctcaagcgatccgcccactttggtctctcaaagtgctgggactacagacatgagccaccacacccggcagagcttctatttcttgagtgtgttctcagccatgctaagacattttctcttctcagcctgatgatgcttttggcttgtgtttctttgtttttaattaccccttcccagtcgctgtcatgggatcatgagggtcttctgtccatctagatgacacctttcttgtgccacgtgtctccaacattccctggtttttaaacccttattgctttcaagatactatccaagctccttaatgtggcacattgtccttcgctgctatctgcctgctttttttttgagacagagcctcgctctattgcctaggctggagtgcagtggcgcaatcacagcttactctgcagcctcgacttcttgggctcaagcaatcctcctgcctcagccttctgagtagctgggaccacaggcatgcaccatcatgcttggctaatttatttttatttatttttatagagaaggagtctccctatgttgcccaggctggtctcaaactcccggactcaaagttcattgcagtttcaattttttccttggctcaaggatcctcccacttcagcctcctgagtagctgggactacagacgggcaccaacacacctggctaatttttgtattttttgtagagatggggtcccactatgttgcccaggcttctatctgcttttatctcaccttccactcttccatccttcctttcttttcttttatttcctttcccttcccttgccttccttttctttctttctttctttctttctttctttctttctttctttctttctttttctttctttctttcttgacagagtctggctctgtcacccagactgaagtgcaatggcaagatcttagctcactgcaacctccacctcctgggttcaagcaattctcctgtctcagcctcccgagtagctgagattacaggtacctggcaccacacccggcaattttttttttttttttagtagagacggggtttcgctatgttggccgggctggtcttgaactcctgacctcaggtgatcctcccacctcagcctcccaaagtgttgggattaacaggtgtgagccactgtgcctggccttttttttttttttttttttttttaagacaggaccttgctctgtcactcaggccagagtgcagtggcactataatcactttctgcagccgtgacctcctgggctcaagggatcctcttgccttggcctccctagtagctgggactacaggcatgtgccaccacactggctaatttttaaaactttttgtaggccgggcacggtggctcacacctgtaatcccagcactttgggaggccaaggcgggcggatcacgaggtcaggagattgagaccatcctggctaacacagtgaaaccccatctctactgaaaatacaaaaaattagccaggtatggtggcgggcgcctgtagtcccagctactcgggaggctgaggcaggagaatggtgtgaacctgggaggcggagcttgcagtgagctgagatcacgccactgcactccagcctgggcgacagagcgcgagacaccatctaaaaaaaaaacaaaaaaaaaaaacaaaaaactttttgtagagatggattcttgctaggttgcccaggctggtctcaagcttctaggctcaagcagtcctcttgcctgtgcctcccaaagccttgggattacaggcgtgagcccccacacctggtcctaacccactttctgaacttccaaccacaccattttgtcctaatatttaagtcacaccataacatgtcccacttcagaaatgcctaccaaagtagtcttcaaatctttttaaatcagtggaccctttctaccaaacaaatgttattttttaaatatttattttagagtaatttagacttttagaaaggttgtagctgggcgcagtggctaacgcctgtaatcccagcactttgggaggccgagacaggtagatcacctgaggttgggcgtttgagaccagcctgggcaacatggtgaaaccccgtctctactgaaaatacgaaattagtcaggtatggtggcacgcgcctgtagtctcagctactcgggaggctgaggcaggagaattgcttgaacccaggaggcggaggttgcagtgagctgagatcgcgccactgcactccagcctgggtgacagagtgagactccatctcaaaaaaaaaaaagaaaagaaaaaaaagaaaggttataaatatattataaagagttcccacatacccttcacccagtttctcctgttgtttgtatcttatattatcaccatatgcttgtcaatgctaaggaattgctgggtgcagagtggcacatggctgcagtcccagatactcaggaggccaaggcaggaggatatcgcttgagcccaggagttcaagtctagcctgggcaacacagtgagacctcttttctgcaaaagaaaacaaataaaacatctaaaaaagaatacactggaggcggcgtggaaacaaggatctcatttgggagttgtctgcaatgttctgagcaagcagtaacggaggcctcaagtcagggctgtggtcatggaggtggggaggggtggttggtttcactatctgtgttgacttaattttagatttgcagactcaactgagtatgaactttaagagaaagagagaggccaggcacggtgggtcacacctgtaatcccagcactttaggaggccaagtggggaaggccgcttgagcccaggagtttgacaccagcctgggcaacatagtgagacccctgtctctacaaaaaaaaatttttaaattagccaggcagggtgatgtgtccctgtaatcccagctactcaggacagtgaagcaggaggatcatttgagcccagaaagttgaggctgtagtgagctgtagttgcaccattgtgcttcagcctgggagacaaagtgagaccctgtctcaaaaaggagaatggggagagagagagagagagagaaggagaaagagagagaaagagagagagggaagtcaaggagaaccccacattttttgacatggtgtattagtctcttctcacactgctaataaagacatacctgagactgggtaatttataaaggaaagaggtttaatgcactcacagttccacatggctggggaggcctcacaaccatggcagaaggcaaaggagaagtaaaggcatgtcttacatggcagcaggcaagagagcttgtgccatttataaaaccatcagatctcatgagacttattcactaccacaagaacagtatgggggaaactgcccccatgattcagttatctccacctggcgccgcccttgacacgtggggattattacaattcaagttgagatttgggtgggaacacagccaaaccctatcacatgggcaagtgaaaggatgggtttgccatcaaataaaatggggaaggagactgactaggtgggcagattaggaactcagctttctatgaagtgcctactgatggatagagatattgtgttggccatctattaggttggtgcaaaagtaattgcggttttgccattaaaagtaatggcaaaggaaataacctttgcaccagcctaataggaattggagtctaaaattcaaaaaaggtaagtcagagctggagatccaaaggcaggagtcagcctcctgtggaggctatttaaggaactgaataagggcatagatgcaggagagcacccaggactgagcccagggcttactctccatcattaaagaggttggggaagatgaggaggagccagcagagaagactgaattggagcaaatcagaagaatgtgggtgctggctgtcatgcaaggaaagtgctaagccatttcaagtatgagggaatgatcaatgatgtccactgatgctgatgtgttgactcaaatgaaaaatgagaatcaaccattggatgtagtggcatggagatctttcgtgacctgagccagagctgcttaggtgaagaggtgaaggcaagaggctactggaaggattactactagctcttttaaagagttctgctgtgaagggtagaggaagagagatggggcatgtgttagctggtgggggaagtggatttcagaggtttgtttcccttaaaaaaaaaaaaaaaaagaaaaaagaataaagaaaaaaaaaaggccaggcacaatgactcacacctgtaatcccagcattttgggaggctgagacctcgggaatttgagactagcctggacaacatagtgagaccccatctctacaaaaaaaatttttttttaattagctgggcatggtggtgcatgcctgtggtcctagctacttgggaggctgaggtgagaggatctcttgagcctgggaggtcgaggctgcagtgagctatgatcacaccactgcactccaggctggacaacagagcaagaccctgtctcaaaaaaaaaagatgggagacctaacagcagattttatgctgataggaataacctattaggggagaaaaacatgaggatgctggaggaagaagagtgtcaggaggacatctcttggtggacgagaggggatggcatttggtgtacaggtggaaggtttcactttagatgacagcacacacagttatctatagaaacaggagaaaatgcactatatgggcatacatgctgggaggtagagagtaaataatagtggtggttgcttgtggaaattctcttctaatgtttttatatttttatggtttatcaaggacaatttatatttttacagtttactgcaaacaacaagttctaatttattcaataattatttgtgggtagaccgagtgcagtggtgcatgcctgtaatcctagcactttgggaagccaaggtgggaggattgcttgaactcctgattcacttctgagcttgaatcaggagttcgagatcagcctaagcaacatggcaaaacactgtctctacacaaaatacaaaaactagccaggtatagtggcatgcacgtagtcccagctattcgggaggctaaaacgggaggatcatttgagccctgaaggtggaggttgcagtgagccaagagcgagccactgcactccagcctgggtgatagaataagaccctgcctcaaaaagaaattcttattcttcttcttcttattattatttgaggagacatttactttgtaccaggcgctgtgctagatgctggagatacagacatcaacaatgacaaggctaagtgcctggcgtatttgtactttgagtctaataaaagacatcacacagacacacaacacacacacacacacacacaggattgtcaaaggatcaaccatttcacatgtcaagatcaggaatgatattggtctactactgccttaccatatctcctaccatgacctcatcttcctcttgccagattttaagtctttatacctcaactcccagaactctcttcgcctcacaccctatcacaatgtcatccgtaccccacggccaatactccatcattcgggaaagcaaagttccaaagcgtcaagattgtatcaatggacctgtctctatggcaacagtcctgaatgagccaagcaaggtaaccctggagatggcgtgaatgagaaagtggcctgttgccacggagacgtgctgaatgggaaggcccccacgagccaggctatgtcacgaagccgaaacagtcagcatgaagtcggtatgtctattttcaactcggaattacaaaaatacattttaatagagctcatgacccatctccttcctcgtccctgcctcccaccccactcttcagccttcatcctacaacacaatcgagcctcaccaggaacccttcaaacccctcaaggacaccttactgttccttcagtacacagtccccttcctgggctgaggtggtattcctttgaccaactactgtctcccctttgggaccaacagtattctcaaaagccatgagcttatgggaagaacattaactacattctttggggcaagaacagttgctcacctgtgaaccagctcagcttgcatctgtgagaatgattgcaatgggtagaccagttctccatcaaagaatggccctagcaccccacacacagtggtataatctgatcatgctggtgtattgaacatataatgttagtgccacatgaaaggaatttgtaaaaggacttagtgcctagaaaggtacctttgaagatcttggaatctctgaaacttacccaggttccttataccctgctcaaagtattcctccatttatttcttcattcattagttcttttgtttcaccacatatatatttttgaaacggggtctcactctgttgcccaggctagagtgcagtggcaagatcgtggctcactgcagcctcaacctccccatctcaagcagtcctcccacctcagcttcctgagtagctgggacaccacaggtacaagccaccacgccaggctaattcttgtaatttttgtagagacggggttttgccatgttgcccagtgtattcgtttgttctcacattgctataaagaactacctgagactgagtagtttataaagaaaagaggtttaattgactcacggctccacaggctgtgcggaaggcatggctgaggaggccacaggaaacttgcaatcatggcggaaaatgaaggggaaacaagcacatcttcacatggtggcaggagagagagagtgagggggggagtgctacaaaaccaggtctcacgagaactcactcactgtcatgagaaaagcaagggggaaatctgctcccaggatccaatcacctcctaccaggtccctcccccaacattggggattacaattcaacatgagatctgggtggggacacagagccaaaccatatcacccaggctggtctctaactcctgagctcaagcaatctgcctgccttggcctcccaaagtgctaggattacagacgtgaaccatatttattaagcattgttacagcaaagagaagcattgttgcagcataacaattggaagactccattgatggacgtctccatcaacaagaactgtcggataaactatggtacacccatcccttagcgtgttatgaagtcattacaaaaagaagaagcagatctctgagtgtcaataagagctagtacttatagggtgtctactgtatacaagtgctgttagaaagtgagtattaactcatttaattcttgtaacaagcctgtgaggtggattctttcatatccccattttacagagaaggaaataggaatctctatatccaagatatgttatcaggtgacaaaagcagtttttgaatggtgccgccattttctcgtaagagcaaatctggaagattccatgagaaattaataattgtgtttgcctctgtagcggcaccctgaaagatttggaagtaggtgtggaaaggaaacttactttcttgtgtctttctgaattttgtactgtctacgcgttttgtctttcacaaaaccaaacagaaaatgaccatttggtgcattttgtgtgtcaggcattcttctagtctagagaagcacaggagagcaaaatattttactgacgagaaaaatgaggcatggagaagttaagtgacttgcccaggtagcagagctgggattccacatcatagggtttatacaggaaacaggtaaacagagctgtgcttgtgtgtgggtatgtgtgtacacatgcatacatgtgtgcatgtgtgtgtgtgtttgtgtgtgtgtgaatgtgcttgtgtgttgggagagggaaatggcaagagaagaacctacagaaggtcagcaggaaccaacccatgttttgaggagtttggactttatcctgaaggcacaagggagccatggaaggatttagacaaggggtggttgtgcttagctttttatttagaaggatgactctggctgaagggtgatggcccagaatacaggtatatgtgaaggactcctcctgccctagtaggaggatgcccacccaccctctctgcccagtgcagtatcaaagggcaaattgggtacagagaattctcaccaagctgggtagaatccactctgatgctggggagtggacactgaatgcaccagcctctcctcctgctcaatccctgaattgaagctgttccactaatgttagggatcagattcccttcatatatatatatatatatatatatatatatatatatatatatatataattttttttttgagacagagtctccctctgtcacccaggctgaagcccattgtcgcgatcttggctcactgcaacctccacctcccaggttcaagcaactcttgttcctcagactcccaagtagctgcgattacaggcacccgccaccacacctggctaattctatatttttagtagagacagggattcacctatgttggccaggctggtcttgagctcctgggctcaagtgatcagtctgcctcagcctcccaaagtgctagtattacaggcatgagccaccatgcccgtcctttttatattacctttttttatagagatgtggtttcactatgttgaccaggcaggtcttaaactcctggcctcaagcgatcctccctcctcagcctcccaaaatgctaggattacaggtgtgagccactgcatctgtccagactctgttctccataaagctggcatatggaaagagggaagaccatccaggcaatatcgaagtcccattggtgctgatgtggctgctgagaccacatgaatggatgcattctgactctgccacctctcagctatgtgaccctgggccagtcagcaagtccctctataactcagttttctcatctgtaaaatggcgtcaacagtagccaaccccagcaaatactgtgaaatatacagaacatcattataatggtgaggatgatagagatgctatgttatcagaatacctgggcttgaaccagctccccttcttgcaagctgtgtgacttggagctgatgcccaaacctctgtgggcctcatttgtttcatctgttcaatggggataataacactcttacttcatacagttatggaggatttattgaaataattgacatacagctcttagaacagtatccggctccttgtaagcgctcaagaaatattacagactgttgataataatgcaatactactaccaataatatggccaggagcaatggctcacacctgtaatcccagcactttaggaggcagaagcaggctgattgcttgagcacgggagttcgaggccagcctgggtaacatagggagactctgtctttacaaaaaataaaaataaaaatacaaataattagccaggtatggtggtgcatacctgtagttccagctacttgggaggctgaggtgggaggattgcttgagcccaggaagttgaggctacagtgagctgtgatcacaccactgcactccagccagggcaacagagtgagaccctatctcaaaaataataataatggccgggcgcgctggctcatacctgtaatcccagcactttgggaggccaaggcgggcagatcacttgaggtcaggagtttgagaccagcctggccaacatggtgaaaccccatctactaaaaacacaaaaattagccgggtgtggtggcggggtgcctgtaatcccagccactcaggaggctgaggcaggagaatcgcttgaacccgggaggtggaagttgcagtgagccgagatcacaccactgcactccagcctaggtgacacagtgagactccatctcaaataataatatgagtaataataataatatcatttttatcatcattcttactaacagtctctcactccttgccctgcagttttgcctgttttcttggaataacactcttccacacctttcccctcagggatggttcacgtttagcatcatgacccacccctggggattagttagctcatttctggaaagcactttggagctgtaggtgctttgcaggctggaaacatcacgggacttgtaccatatttaagcaatgccagattattctgcctggcagggggaggacacagaggatacggccctggtatcttttctccctgcctacctcagctttgctctgaaccattttctgtcctgttcagggcagcctgggccacttgccacttccagctttctcgggagaggatgccttcctgatggcacgcctcttaacacacacctggtgctgttgttgaaaaagcaacaattgactccagcgccagcactgagaggcttgtccttaaaattagcaggagctgttggaaggtcgctgttagctcttttgactggaacacactgttccccaggtggcatgaggctgaatacagtgcagggattggctctgctctcaggtggcctgctccacgctcctgagctccgggtggaagctgtgaccattatttccttaacagaaacatatatagcagcattaactatgaaccttattactgtgtgtgtgtgtgtgtatatgtgtatatatatatatgcacatatgtgcatatgtgtgcctatgaacctgttctgagcactttacaaatgtcaatgtattttatcctcccaacaacccattttataaataagacttgaggcacagagaggttacgttactgccccaagatcacacagctggagagtggtgaggccaagatttgaacatatgtaccattgtaccatatgtaccaactttttttttctttttgggatgcattcttgctctgtcacccaggctggagagcagtggcatgaccacggctcattacaacctcaacctccaggttcaagctatcctcccacctcagcctctcaagtagctaggaccacaggtgcataccaccatgcccagctaatttaaagtttttttttgtttgtttgtttgtttgtttgcagagatggggtctccttatattacccaggctggtctagaactcctaggttcaagcaatccccccacctcggccttccaacatgctgggattacaggcatgagccactgcacccaggtcctccctccttataaaggtcgccaagcacaatcttgtgagcctggccctatccacacccatacgcaacatggtgtgtatttttcaaacaaaaactgaatgaacacctctggtttgggttcccctcacacttgtcccgggtttgttgactctgtgttgtgggcctagacaaagcagtgtctggagctcctagacccagggaccagacagtctgggttcaaatcctggctcttccacttctgcctgagtgctctctctgaacctgtctttctttatctataaaatggagataatttttttaaactcatcacttggtcaaactgctttgagcatgcaaatgagttcatatgtataaacctcttagaatgtcccaggcaaagaacaacacttcactcagatcaacatttatttagcatctactgtgtacccatgactattctaggtgatgaggagaccctctggttcttatgaggtagtgaggtgggggagggtgagaaccctaaacattaacgatggtgtgttcgcaggtgggaaaatcagtaaagtcgggtaaagggaatttgggagtgctgtgctcaagtcctggccctgccactttctggggtgcaagatacagcattgaatagggtggtcagggtaggccttattgggaaagtgatatttgagcagacgatctagatgtcggcacatattgctactgtttgatggtactaatatgagtttgagtttcacttgcaagtatatatatatatatatatatatatatatatatatatatatatgtgtgtgtgtgtgtgtatatatatatgtgtatatatatgtatatatatgtgtgtatatatgtatatatatatgtgtgtatatatgtatatatatgtatatatatgtatatatatgtgtgtatatatatgtgtatatatatgtatatatatatatgaaatttggtccatttatttatgctgatcaattaattgatgttgaaattataattgaatgttttattaataaacagatacccacatactattttttcagaaattgttaggttttggggttttctttagattttgattatttttatttgcttaattttcttttttcttttttttaattttatttttccataagttattggggtacaggtggtatttggttgcatgagtaagttcttcagtggagatttgtgagaacctggtgcacccatcacccgggcagtatacactgcaccatatttgttgtctgttatccagtgctcacctcctactcttccccccaagtctctaaagtccattgtaccattattttactcacccacattctttggcctgagatgctgagtggtcatgactcccagatcccttcttgtttctgtatcaaagatctttactaagatcctggcctagggaacctattccctttcctcatccccaatgggagaaggggcttcttccccagcttatttgccaactcataggaaaggtatgaaggagaggactgtagttgtcttgaagctggtcagatgttgaagagatgataatatttgctgatcaagagagacaaagcaatgctggaagaagaggctgtgttagttaacaccagctgcaataaccaataaaaccaaaaatctctggcttaagagtatgcatgagtgagaaatcaacttctaaagtacaactggtggccggatgtggtggcttatgcctgtaattctagcactttgggaggctgtggtgggagggtcgcttgaccccagtagtttaacgccaacctgggcaacacagtgagacaccatctctactaaaaataaaaaataataaagtgaaactggtgaggggtgcaatgaggtggagtggtgggtgactcaaatatggctcgactccatgcagtcactcagggatccaggctgttggaggctctccctgcttaaacatgtggcttccaaggttgttctaagagcctacattgagacagcagctggggaaaagggaaagtggagtgggaggtacttatgagggttcctggaagtggtgaacaacacttctgcctgcattctattgggtggaatttagtcatgtggcccaggctagctgcatgggaggctgggaaatgtagtctctgattaggctgccatttcccagtcccacttgtgaatctttagtgggaagctcaccatgtttgcaccagggattcagtctacctcccactcatgcctcaactatgtatcaggcactgtcgtaagtactttacatatcagcctacctaatgcaaacaactactcagtgggtgctttattggtcacatgtattagtgagaacatggaaacccagagccgttaaatatcttgcccaaggtcacacagctaggaagtggcagagttggaatttgaatccaggaaatctggctgcagagccccacgcttagtataaattcattgtagtttagaaagaggcagaaggaccctaaaattggcataatccattttttggtccctaaggaactgactgaattgactacttgtaaaagtgagtcctggacaggcaacagtggctcaggtctgtaattccaggactttgggaggctgaggcgggcagatcacctgaggtcaggatttcaagaccagcctggccaacatggcaaaaccctgtctctaaaaaaatagaaaaattagctgggtgtggcggtgggtgcctgtaattccagctactcaggaggctgaggcaggagaatcgtttgaacctgggaggtggaggttgcagtgagcaaagatcacgccactttactccaacttgaatgacagagcaagactctgcctcaggaccgccatggccccctgggttctaggtcagagtttctccgccacagcactgatgactttgggggctgcattattagctccaaaatgggagctatcctgtgcactgcctcaacttacttgatgccagtagcgcccgcgccccagttgtgagaaccaaaaatgtctccacacattgccaaatgtcccctgggaggtgaaatcacccctggttgagagtcactgttctagattgttaaatattatcttacactctagcacaagtccaaggcaaactgacttagaaattaccaaccttgcaaaaaatagaagatttcttaaagtcagtgagcatgatggtggcaagctgctgaaatcacacccccagacattagcagatgggatctggacagtattcatctagttaaaaattgacaaggactgggacactgcaggctcttcaaaagagaatcatttgaataacaaggggtcaagacaggggtaattggtgaaagcccctgctcataatttgaaaatataaataggcatcatgaaaattcatcctgcaaaagtcaaaagtcgaatgtgcagtgttatacatgatcagttgatttgggaggggaaattgcatgcacacacatgagagcttgcacacccacacacacacacctgttcaagtgtgtgtgccagtgctcagtgaggaccatctccccaacctgtctgatcatcttgctttggggtgaccctatgggtgaggcagaaattcttggatcatagttttctaatgaatattataattgttaacttctgatgggtgctgactttttcatctttgcaacactgcgtaggtatttttactctccccattttacagatgagacaactgaggctcagaaagattgattagctctacacgaagccaggatccaggcttagcctggctccaggaatcatgttttgagttacgtagcttccctgattctgagggacctccccacttctgaaatcttctactgttactccccatggccctttcctattgaccggaggcaccccagctcctcactcgtcccttatcttatgaaacatgaccatgatgtctgaattcaaaggagagcctgggctttgtggggaaaacgaagcagaaaaagaaaggtggaggttggtggttgtttttggcatggtgaggagcctgtcgttgcttgaggaaagcaagaaaggagattgctggggcttggatccatctctgggtgcctgtgggtctgtctgtaaaaatgagaactggtcgtgctcattagaggatttgaccgttaggccttgggatagcgatttgggaacttttttctgctaagacaaagaataatatggttcaggttcattttgctcctgctttcccaagccctacatctcttctgggcttttttttttttccttttctctccttcttcttcttcttcttcttcttcttctcatttttggatctggacttctgctgactcatctctctgagcaaggaaggagggaggaagtcagaattgctcattaaccgttttctttagtgactcagctgtgattcacattttaattaatggaggagaaaaacctgatcagtcctaaggcatctgcccaatcacgcataactccaggctggtgataataataatacttgaaaaaagtggggtgtcctgaattaaactatggctcattccccacattagtcttgaggactccaccaggccctctaagttccaggtctcaatggggctccctgaaccagagcagctagtccaagccccgagcagcatttctgcagagttagtctgaggtcaggacaagaaacagaggctcaagccctcctgggatcgcaggaggatcatgggaatgtaatattgtttcctgagctggtctttggctataatcccaggctcaagcctggcctccctcccctcggggcctgaaatttgtcagagcctattgcaggggcagcttctgtgctttttgtttgcccagagaatgagaaaagtccagataatcatgaccgctacttcctgagcacttactatgcatcaggtggtgtgctcagcacttctcatgaatgatcacgttgaatcctcactctgtccacaaaaagaaagagcttttatataattctccaacctccctatgaggaaactgaggcttggcaattgcccaatgtagacaattagtaaataatcaggcaggatataaacccaaccctttcccacctgggagccagagcttgcatctactatacttctctgctttccagtcagctgcaaagaaaaattggaagctgatagctcattcaacaaacacttattgaacccttccacctgctcagccctgttctagacaccagagatccatcagtgaaccaaagaggcaaatccatggtctcatgaaactgacaatttacctgcccaagtgtattagttactgtttataagttcctattaagtgtattagatatgcttgcagctgtaacaaagaatcccaacatgcataagggctcaaaacaataaaaatttcgttcttgcacagataaagttcaaaaggtgtattctttttttttttttcttttgcgacggagttttgctcttatcctccaggcatgagtgcaatggcccagtctcggctcactgcaacctccacctcctgggttcaagcattctcctgactcagcctccccagtagctggaattacaggtgcccgccaccacacctggctaattttttgtatttttagtataggtggggtttcaccatgttggtcaggctggtcttaaactcctgacctcaggtgacccacctgcctcggcctcccaaagtgctgggattacagccgtgagccaccgtgcctggccaaaaaaaaaatgtattcttaaacagcaggcacctctcctctaagcagtaagtcaggggcccaggcttgttccatattgtagctcctcatcttcaacccatggcttccaaagtctccatgcttcttgatatcaagccacagaagggaaaagagcatgagaagggcacaggagaaatgtttctgggacagacccagaagtagtccatatgacttccatctacctcccactggctagagcttacatggcggcacccacttgcagagctgggaaatggagtctaactgagcatccaggaaggagagacagacatgagtctttgcgtgggtcctcactgagaatcaagctccacattttgatcgatgtcaccagagcgtacatggcggcgcccacttgcagagctgggaaacggagtctaactgagcatccaggaaggagagacagacatcagtctctgcgtgggtcctcactgagaatcaagcttcacattttgatctgtgtcacctccttgcaagccctaccttaggacaattttaagggacattcctatcttcttccacccttaggacagttttaagggacactcctgagttcttccacccacctcctctgtttcttgggcttccagctctcaggatttgcctttgccttacaatggggtgaagcaagaatctggaagaatgtctctccccacaatttgaagtcttatttgaaaaaaagcagtagagcatccctccctcttgaggtagggaaatctagaatcaaatcctgcttctccagactttgacctcagaaactggggggacttcaaggtcttcaggtgggcagctttcatgaaccattcattcctcccacctcataccaatcagggtcctaacaggaaaaagaattaacttctagatggttcaaaagaagaccatgccatgaagagactccttaaagagataggaacaggtgagagaaatagataacggctgtttgaggtcctcagagagaagccatcgcgagccctacatttcctggaacccagtggaggcagagctgtgcagaagggactactgtcagaaccagggagggagcagggaagcaatattccaatctctttccctcccctcatcttctgccagcgcttcccctcagccaaaccaaaccggaaacggagcaaagcattctgggagttgtagtcttcaagggtccgcctcgagggcacagagcccgctggagcattgacctagagggcacacagggaatgactagtttgcaccatcatgtgacggactgcacgccctcgattatgtaatccactctataattcaactgcagagctgcatggtacagcaggatagccactagccacacgaggctatttaaatataaatgtacattcattaaaatttaaccaaatgaaaattttagccactgagccccatttcaaatgctcattagccacacgtggctcttggctaccatattggacagatcagaatagaacatttccatcatcccagaaagttctaggggccggcgcagctgtggtgtaacctgagcccatgcatgttatggaatggagaagagagaaaacagcacaagaggcagttttgaagggagacagagagctgtggatcagtagggaggagactctctaggcaaaggagcagttgagaagcaagaaagttgagtgagctgctttgctgcgatggaggcttccctcacggggaagagtagagtcagaaagctttagttcaagttcagctctgaaatgaaccaatgagtgttctgacaagacacctggccttccggaaccttggttttgtagtggccaagggcttgaccctctgaaggttcactgaaaaaaatcaactcacaaggcatattaattggagaaaaggcaggcagatttatttaatgtgtttgcacgagagccttcagaatgaagacccaaagctgcaggggaaattgtccgttttttaagcttaggttcaacaaagtatggacagcggtgtagaaatatgattgaacaaaaagtgtacaatgtaaatgctaatagactgagtggggaaacccaaaaagggctgtcttgattctccttggtctctctgagcatgcatttcttccgggtatgggacaagaccctctctggaatggagggggggctctcttggttctccttggtctctctcagcatgcattccttccgggtatggggcaggaccctctctggaataagggggctgtcttgattcttcttggtctctcagagcatgcattccttctgggtatggggcaggaccctctctggaatgggatccttataacctacggtcaaataacgtaagttagataatttcttttttttttttttcttttttttgagacagagtctgattctgttgcccaggctagagtacagtggcacaatctcggctcactgcagcctctgccttctgggttcaaatgattctcctgcctcagcctcccaagtagctgggactacaggtaagcaccaccatgcccagctaatttttgtattttttagtagagacagggtttcaccatgttggccaggctggtctcaaactgctgacctcaagtgatccaccacctgggcctcccaaagtcctgggatttgtaatcccagcatgagccactgtgcccagccagatcatttctttttctttttctttttcttttctttttttttttttttttgagatggagtctcactctgttgcccaggctggagtgctgtggtgcaaactcagctcactgcagcctctgcctcctgggttcaagcaattctcctgcctcagccttccaagtagctgggactagaggtgcgcgccaccatgcccagctaatttttgtatttttagtagagacagtgttttgccatgttggccaggctggtcttaaactcctgacctcaagtgatccacccacgtcggcctcccaaagtcccgggatttgtaatcccagcatgagctaccacagctggccagataatttttttataactagtttttacaaagaaaggtggagggaaagttagagtaacatttttaggtgttagggctgactttggggaaaagaggtctggtttctacgacccgccttagggaagagggattctagtttttgtggctagccccaggggagaatgggactaagagatagaagggcaggagaaggtcagagaaaaacttttgcttctgtggctgcttcggagaacttcattttggggtattgttttctgagccccaacagtttgcttatcagtgaagtgggtataggcgcccacctcccacagtgacgatgctgtgaacagggctttggaagagtagaactatgaaatatttgttgttgccttgtggggaaatggtcgttaaagccaaaattgttcaagagaagaagcaggaagagttcctttctttcctgcaggtatcctcttaagctgagtcttcagaatcccctgacaacgtttaatcaacactttattaaattcaccccaaccctgcttcaaaccttcacctggtcctcgagatcttccaactgtttcttgatgaagttagcaggcaattgtatggcgggatcatcatctcatgttttgttttgtttttttcctttttaccctctgactttgagaaatccttgtccttttacttttccaaacctgagagcattgcagagaagttagaattgagcaggacatgggcttaagacccagcccagccatgtgctagctgtgtgaactcgaagcagtgaccccacctctctgacctggaaagtagagggaatgataggacccaccaccgccacacttgtagggtcatcatggggattgaataaaataatgcataagacttggcccacagcaagcactcaagaaatgttagctacttcctaaatatatttttaaccttttattgaatataacatacatacagaaaagcacatgtatcatacaagtagagcttgagtgattttcaaaaactgagcccagtcatgtaaccagcgcctagttcaagaaacagaacatagccgagtgaggctgaggcaggagaatcacttgaatctgggaggcagaggttgcagtgagcagagatcatgctatcgctccccagcgtgggcaatgggggcggaggggaagagagagagagagagagagagagagaggaaggagggagggaaggaaggaaggaaggagggagggagggagggaagggaaggaaggggagagagagaaaaggaaagaaaagaggaagacagaaagagagagagaaaggtaaagaaagaaaaggaaagaaagagaaagaaagaaaagaggaagacagagaaagaaagagaaagctaaagaaagaaaaaaaggaaggaaggaaaatagggagggaagaggaggaggaagaagaagaagaagggggggagggagggaacagctgcagcttcgaggaaggaaggagggagggaaggaaggaaggaaaggaaggaaggaaaaaaaaacagcaccaacgtttagaaacccccttgtgcctctgaggtcaccagtaactccatcctgacttcaaacagtctagattagttttgcttgtttttgaactttaagcacatggggtcatacagcatgcatgcattgacttctttcccttgacgttgtatgtgtgagattcatctgtgctgttgctgttcatttgttctcatcgctgtgtgtgctgaaccacctgttcatttactctactaatggtgggcagtttggtgctttctactttggggctattccagagaaagctactttgaacacactcagatatgtctgtgggtgaccactcttcatatttctatgggagatattcctaggaccggaacatctgagtcagagggaggaattggtttagctttggtaggaactgcctaacaattggccgggcacagtggctcatgcctgtaatcccagcactttgggaggctgaggggggcaaatcacttgagctcaggagttcgagaccagcctggccaatgtggcaaaacccctggccaacatggcaaaaccccgtctccgcaaaaaaatacaaagattagccgagcatggtggcgtgtgcctgtaatctcagctactcaggaaactgaggcaggagaattgcttgaacctgggaggcagaggttgcagtgagcagagattgcactactgtactccagcctgggtggcagaatacatgaaactccatctcaaaaagaagaaaggaaggaaggaagggaaggaaggaaaggaaactgcccaacagttttcccaagtgtttgggatggaaggaaggaaggaaggaaggaaaagaaactgcctaacagttttcccaagtggttggaccagttaaaactcccaccacctgtgaatgagagtttgtttttattttgctcctggagtgcctctcctgtagcaggttcccactgaatgtctgggaattcaaatgtaatgcacttgttcatttcctcaagagcttcactccatcaattggattcatccattggctctcccatctccactgacactatgttctcacctctatttggaagacatcctgcctccacctgcccaagtcacattatcttctcattccagcctctcaaggagagttttctctttcaccacctcctctagccctggtgattggcaaggtctcgcaacagtacccttcaaaacactcatgactgtgaatgcactggccttcactaagtttcccattcttctctttctttcttttttcttttcttttctttttttttgaacagagtttcactcttgttgaccaggctcgagtgcagtggcacaaacacagctcactgtagcctcaacctcctgagctcaaggtatcgtcctgcctcagcctccttagtagctgggaccacagacatgcaacgttgtgcccagctgattttcttttttttctttttttttttttttttgagacatggtctcaccctgtcaaccaagtgcagtagcatgatcacagctcactgcagccttgacctcccgggctcatgcgattctcccacctcagcctcccgagtagctggggctacaggcacaagccaccatgcctggctaatttttgtacttcttgtagagaccaggtttcaccatgttgcccaggctggtcttgaactcttgggctcaagcagtcctcctgcctcagcctcccaaaatgctgggattacaggtgtgagccagcacgcccggccatggctaatttcttcatttttggtaaagacaggtctcactttgttgcctaggctggtcttgaactcctggactcaagcaatcctcctgtctcagcctcccaaagtgctaggactaccgatgtgagccaccgcacccggcaatttccccttcttgacttctccagagctctcatccctctcgagctcctgtctcttctagaatcacttacctcaccaccttatggggtttttgcctctgttcctactcctctttatttaagaaaacactgtactttaagagggcttcagaaaccacccgaaatagaaacatgtccttttgttcaatcctttactttaaaagacaaataaaatgaagaattgctctccatgtagaaggttaaggagcttgggaggaccttctgtgagtggggagaactttacattaaaggaaaaaaaatgctggagaatagctgtgaacccaggaagggagaaggacttcctccactgaacttgtaaagcacaaactctaaggcaaaaaaagacatgattacatgaaaactaagatatttgttcaaataaagatgcaattggggccaggtgcggtggctcacgcctgtaatcccagcactttgggaggccgaggcaggcgaatcacgaggtcaggagatcgagaccatcttggtcaacatggtgaaaccccatctctactaaaatacaaaaaattagccaggaatggtgtcacgtgcctgtaatcccagctacttgggaggcttaggcaggggaattgcttgaaccagggaggtggaggttgcagtgagctgaaatcacgccactgcactccagtctagcgacaaagcaagactccgtccaaaaaaaaaagatgcaatagcaggtggttcgggaaccaaaccttacatccagatgctggttgtcccatttcctgtgaatccttgggtgagttatcaacctctctgagcctcagtttcctcgtcaataaaatggagaaaatagtatctacctatggaattgttgtgagttttgaatgagttaatatttataaatcatttagaataggaattagcacatggtaaatagtggatagaatcataaaaaaaaaattgatcaggggttaacttctaactgctgtttgttatagaggtccctagcactgtgtggtcattttaaatttagatgatttagaattaaatgaaatttaaaactcagttcttcattcacactagccacattttaagtgctcaaaacccacaggtgactagtggctaccatatttggcagcacagattgagaacagatttatcatccagaaagttctgtcagacagtgttgatcaaggctacatgagggtctgggtgcagtggctcacacctgtaatcccagtgctttggaaggccaaggtgggaggatcactggaggccaggggtttgagaccagcctgggaaacagagagacctcatctctaccaacattttaagaattagccaggcaaagtgttgcatgcctgtagtcccagctactcaggaggctgagacaggattgcttgagcccaggaatttgaggctgcagtgaactatgagcgcaccgctgcactccagtctgggtgacagagtgagacctgtctctaaacataaaaaataaaaatgtaggtggggcatagtggctcccgcctgtaatcccagcactttgggaagccgagatgggcagattgtgaggtcaggagatcgagaccaccctggctaacatggtaaaaccgcgtccgtactaaaaataaaaaaaaattagccaggcatggtggcgcatgcctgtagtcccagctactcgagaggctgaggcaggagaattgcttgaacctgggaagcagaggttgcagtgagctgagattgcgccactgcactccggcctgggcgacagagcgagactctgtctcaaaataaataaataaataaataataataaagtaaaaataaaaatgcaaagactacctgagggaatgtctgcaagtcaaccagaataacacagcaaccccaataggaaaacaggccgaaaatgtgaacaggcggatcagggaagtgaagtctgaaaagctaatcagcctatgacatggtactcaaagtcatttgtaaccagaaagatggaaatgaaagcagtatctctgtacacctttaatattggggaaaaaatatgtgaataagccaagggtttccagcgatgcgggcacagaggaaagtcttgcaccactcaaaggggtgtggcccagggaggccactctggagacatatcggtagtactcagtccagtgaggtccagcaccatcagcgcttatgtccccaggcatccatcccagggacattcttaccaggtctgttaggggcaggtacgagaatgcttactccagcaccatctatataaggggagctgaaggccacctggtgtccctcctggagaccaggaggcggcatgtgacagcggcacccatggagcaccagaatgagtgagagctccagaccgcatatccgacagatactacgggatggggcttttagaaatatggttgttgccgggcacggtggctcatgcgtgtcatcccagcactctggcaggccaaggcgggtggatcacctgaggtcaggagttcgagaccagcctggccaacatggtgaaaccctgtctctattaaagatacaaaaattagctggacgtggtggcgggtgcctgtaatcccaactactcgggaggctgaggcaagagaatcgcttgaacccaggaggcagaggttgcagtgagccgacatcgtgccactgcactccagcctgggtgacaagagcaaaactctgtctcaaaaaatttaaaaaacaaaaaataaaaatatggttctgggtgaaaacaggaaacaacagaatgtgtctaacttcatcctgcttatgtcagttaaaaatagacacactcaaaatatcgcacgtgtttttgcgagaatgcactcctataaggccaaattaaacattctctcagttgtctctgggagggagaagaatgaaagtagggtatagagagatataggggaattaatgcatgaatgaatgaaggtataaacaagagacaggcgtcatacagaccaaaggtaaagatatcccgtaacctgaggagagcaaagaacttgactctgcatttgaagattcagaaaatgaatttcagaaatagttttctcgccagggggtggctcacgcctgtaaccccaccactttgcgagggcgaggcaggtggatcacttaaggtcaggagttcgagaccagcctggccaacatgatgaaaccctgtctctactaaaaatacaaaaattagccaggcatggtggcatgtgcctgtaatcccagctactcaggaggctgaggcaggaaaatcacttgaacccgggaggcagaggttgcattgagctgagatcacaccattgcactccagcctgggtgacagagcaagactttgtctcaaaaaaaaaaaaaaaaaaaaaaaaaaaagaagaggaagaaatcgttttttcaagaaggggaaagctgggtgatttaagaatgaacttgaagaggatcactcagtcctcaacctaggagtggcaagaatatagactgtatgggaagtggttctgctccttggtacccatcttagaaatatttggcctgagtctgtaagaggcaggtactttatctaacctgaggttagggggccactacatccccatcccctcccctgctttctaaccatgctaacatcttctcactctcctgtctcctctccttctcactcccctaatctgcctattcacattttgggcctgttttcctattggggttgctgtgttattctcactgatttgcagacattcctctgtgtcatctttttaattttgttttaatttttagaggcaggatgtcattctgttgcactggctgtagtgacgtagctcactgcagcctcaaactcttgggctcaaactcctgtcctctgcctccacttctcaactggtaacctcacttctcttcatgaggtctctccagccccagggcctttgcacatgttcccctctcttctgagtggcatatggtagttgctcctctgtaaatatttattgacatcctgacttccaaccagcagagaattgacctccttcccatgctcaggctagtgaaggcatgagtttggctgaggtcccagtggggaaggtgagtggggtggcagagttaaccaggagcagcatggtagaatgggtaaaaccagacgtagcacgcaggcaccacatgttagctggacaagtagtttaaccccatgggtctcaatttccccatcaatgaaagggagaatagaacaagtccctggtaagcagcataaaatgagctctcagaatgtaaagtaacaagcacacaacctggaagagaatacatttagtgaatattggctcctttaatcagcaggttctgatatgacttagctacaattaagaaaataaaaatggaggccgggcgcagtggctcatgcctgtaatcccagcactttgggaggccaagacgggtggggtggatcacctgaggtcaggagtttgagaacaggctggccaacatggtgaaccccatctctactaaaaatacaaaaattagccaggcgtggtggcgcacgcctgtagtcccagctactcgggaggctgaggcaggagaaacatttgaacccaggaggtggaagttgcagtgagcccagattgcaccactgaactccagcctgggcgacagagtgagatttgtctcaaaaacaaaagaagtctggaggccaggaggttggttgcagggttggttccttggctcaacaatgtctccaaagagtccttccatctttccactctaacatcgtcactgtaaggactttttttaacatttaccactcacagccccaagacgactgcgtcagttctttctttttttccttcagacagagtcccgctctgtcgcccaggctggagtgcagtggcatgatctcggctcactgcaacctctgcctcctgggttcaagcgattctcctgtctcagcctcccgagtagctgggattacaggtgcctgccactgcatccggctaattttttgtattttttttagtagagatagggtttcaccatattggtcaggctggtctcaaactcctgacctcaggtgatgcacctgcctcggcctcccaaagggctgggattacaggcgtgagccactgtgcccggccgatgactgcctcagttctaaggtacttacccagccatccacgtagacagacacaaaagcatccggccaaagaagagggagaggaagggctgtctcttaccatgtgactcatctcacggggaaaaaatccttttccagaagcacccagcagatttttcacccagatcctgttaggcctacgaatgggtcatgtgacaagtgctcttattgcaaggaatcttgggaaaaagagactattaggcattttctgcctctttgatgggaggtgggctctgccagtaaggcgggtagtggtggtggctcttggatggacaactgtgtcttccattcttcttcttcttttttttttttttttaagagacaaggtctcactctgttgcccaggcagaaatgcagtggcacaatcacagctcactgctgcctcgacctgccaggctcaggtgatccgcccaccttagcctcacgagcagctggaggagtgtaccaccatggccggctaatttttatattttttgtagagatggggtctctttatgttgcccaggctggtcttgaactcctgagctcaaacaatcctcctgcctcagcctcccaaagtgctgggattacaggcataagccaccacgcctggactctcttctttaaatactgagccttccacctcttctagaatatactctgttaattatcaaccacacttttctacatttttgcttcattattcattcagtaaacatttattgagtgcctactgtatgccaggcacagctttaggtgctggagatgctatgaacaaaacagatgaaaatttctaaaaaataaaataaaaaataaaaataaattttgcaaagccaggcacagtggcttaggcctatagttccacctactcaggagtccaaggcagtaggatctcatgagactgggagtttgagtccagcctgggcagcatactaggactctgtctctaaaaaagaaaagaaggccgggcgcagtggctcacgcctgtaatcccagcactttgggaggccgaggcaggtgaatcgcaaggtcaggagtttgagatcagcctgaccaacatggtgaaaccccgtctctactaaaaatgtaaaaattagccaggcatggtggcaagtgcctgtaatcccagctacttgggaggctgaggcaggagaatcgcttgaacctgggaagcggaggatgcaataagccgagatcgtgccactgcactccagcctgggcaacagaatgagaccctgtctcaaaaaaaaaaaaaaaaagaaagaaagaatagaaaatatctgccctacggggatggacatgctagaacatcaaagtccaatggaactttctgcactgatgaagtatgtatgtatgcaccagccacatgtggcttgggagcacttaaaacgtgactggtacaagcgaatttttcatttaatttaaatgaatttaaatctgtatttaaatagccatgtgtggctagtggttactttattgggcggtgcagctctctaaaggccaagagatacatcatcaacttctctcccttgacccatattcagttctctcccaccctgaaaatctcctctcctacccaggctcacatttccagttcttctcctcttgttctccctcaaccatcagcccccgcaagactgacgtgaccctgatgccgtatgaaatgcattcttcatcctttactcttactcacctctgtgcggccctggagaccagtgacctctcctttctcaaaatactttatttctgtgtgtttttgttgttgctattgtttttggggggttttcttgagatggagtttcactctcatcacctaggctggagtgcagtggtgcgatctcagcttactgcaacctctgcctcccaggttcaagcgattctcctgcctcagcctcccaagtagctgggattacaggctcccgccaccacggctggctaattttcttgtatttttggtagagacggagttttgccatgttggccaggctgatctcgaactcctaacctcaggggatccacctgcctcggcctttcaaagtgctgagattacaggcatgagccaccgcacccagcctcaaaatgcttttgaacttgactgtcaggtatgccattctccacaccagtctcctcccatgtctgtgtcttctccctctccactggggacccttggctttttccacttcactcatctaccctgggttatctggtcttccataaccctgtcctctgccacacctcacttattcacccaccacaatatttattgagtactcactaggccatgaaagatgctatacaaaaaaagcccctgtcctcgtggagctgacattctagaagaaagcatgaataataaatacgacttaataaacagtacggccaggcatggtggctcacgcctatcatccaaacactaagagaccaagatgagaggatcacttgaatccaggagtttgagaccaccttgggaaacgtactgggaccctgtctctacaaaaaaaatattaaaaattagctggatagggtaatgcatgcctgtagttccagctacttgggaggacaaggtggaaggattgcttgagcctgagaggtcaagtccgcagtgagctgtgactgtgcactgcacgccagcctgggtgacagagtgagatcctgtcttaaaaataaataaataaacaaacaaacaaacaatataattccagagagtgaagaggcaggatctctttagctaggaagttgagggatgttctctctgagaaggcagaatctgagtttcaacctgaagaattcgaagaggccagctaggcaaaagatgagagttgaaggaatggggacggcagaggagacagccaatatagtaattctcaataaagcagaaagtgagcttttcctgctggcagaacagaaaggaagtcggagtggccagggtgttgtgggacaaggtggtcagcaggagtcacatcacgcaaggtcatgtggtcatggtagactttaaattttactccaagcctgatggaagccattggaagattttaactaaggagtgacggaaaactggcatctcaaactcaacatgtctacaacccagttcttgatctttgaaaccttcttcctccatcttccccatctccattgacagcaacttcatccttcagttagctcaggccaaaaccctggagtcacccttgatacctctctcctgctccacactcagtctttccattggaagccctaggggctgccatattgttctccatagcacttcacaccgtctgacatactatatcttttcccactattgctttgtccttggtagcatctttaggcactctctgaatatctggcacatagtacgtgctcactaaatccttgttgaataaatgaatgaacatcactccgtggtcctttcagaaccagagccattcttctctttcttcaccaccgttgcccctcaccccgcccaactagtcacaggagttgaaggatgacacagtagagaactgggattctggagtcctgtggctggtctggggttcgagttcttactcagtggtaggaacctccatgtgggattaacttatctggtctttagtttcctcctctgtaaaatgggcctcaaactgccaaccgctgggatgcagggaggatttgatgagcccaggcaggctccctggagcacagcaatcaatggcagctatatataaaccggggcctcttttgtactcccactgcctttgtcctagttccagccctcattacaccagcctgctcttgcggctccctcctaacttctgctccatcaccaccaatctgtcctttcagctgtcaggcttgtcttctgaacgccaaccctaatcacatcccttcctgctccaaaaccttacatgactctcactgtccacaggacaagacccagcctctagttgacagcctccactgtccagcttacccaacctctcccctaccacataccctgagtggagccttctgcctccatagggctttcttagccagagaagcctcccttatcttcctgttctcctcctaattccttcttatccttccagggaggaggctgtgaggtaatgcatcttgggagccagctgggattgcacagggtggtgagattatctgcatttccgaggcttgaacaagttaaggcaatgggaaaggtcacacaatgagaaaatgcagggccaggatttaacccgtctgagatgttctgactgtgctatgctgcctccccggacatgagctctgcgataatgctgtccccaggctgtaatcattccctctttcatccctgcctcctctatccctggggtcagagggacttgtagttgaatctctcactcactcattggtgtggtctctccctaaagcagggtggagtttgtcttagcgttatcactgcatccagcacaacctccctggtccaggcttatcagcgttcaactgcgtcaatgcagttgcctcctcctcaatctcccagcttccggccttgccccctagagagatcatattttaatacaagtcagattacatccctcctcccctcagaaccctccatggctcacaccttactcagagaaaaagccaaagtcctctccacaacccacaaagccctgcaccatccatcacctcactgccttcgtcccctcacaccctcccccttgctcgctctgcttcagccacaccaactcatctctgtttctcaaatacaccaggcatggcctagctattaaatgcacggtccagcctggtgcatttgaagaacacggatgaattggtgtggctggaacagagtgagtgagggggagagcgggaggaggacctttgcaccagctggacctttgcaccggctgttccatttgcctagagttttccctgacatattcatatggctcactctcttgcttcccttgctttctcccagtctttattcaaatgtctatttctctgcacttgtgctgtttgatacagtcaccgctggccacatgtggcctttgagcacttcagttgaaacacatgaaagtgtagaatattgaccagattccaaggaaaaccatgtgcaaaatatcttttatctcttaagatacagggtctcgctctgtcttccagcctggaatgcagtggcacgatcacagctcactgcagcctcaaaatcccaaactcaagtggtcctcccaccaacagcctcccgagtagctgggattacaggcacacaccacaatgccccgcccatttttttaattgttattattttttttaatagcgacaaggtcttgccatgttgctcaggctggtctggaactcctggcctcaagcgatcctcctgcctcagcctcccgagtagctgagattacaggcaggagcttttgtgcccagcaggtctacgatcttcttagaatgcttcaggctgggcatagtggctcatgcctcaaataccagcactttgggaggccaaagcaggcagattgcttgagctcaggagttcgagaccagcctgggcaatatggtaaaaccctgtctctccaaaaaaaatacaaaaattagctgggcttggtggctcccacctgtagtcccagctacttaggaggctgaggaaggaagatcacctgagcccaggaggcggaggttgcagtgagccaagattgagccactgcactccagcctagacaacagggagaccctgtctcaaaataaataaataaataaataaataaataaataaataaataaacaaacaaacaaacaaaccaataaatgaattttacctgtttctttttacttttttaatgtggctactagcaaattttaattttttttttttttttttttttttttgagacagagtcacgctctgtcacccaggctggagtgcagtggtgtgatcttggctcactgcaacctccacctcatgggttcaagcagttcgcctgcctctgcctctgagtagctgggattacagatgcccaccgccacgcccagctaattttttgcatttttagtagagatggagtttcgccatgttggccaggctggtctcgaactcctggcctcaagtgatctgcctgcgtcggcctcccaaagtgctgggattacaggcatgagccaccgcgcctggctataaaatttcataagtagctcttaatagatttctcctgggcagtgctggtctaaacactttttttttttttttttttttttgagacggcatcttgctctgtcaccaggctggagtgcagtggcgcgatctctgctcactgcatcctctgtcacccgggttcaagctattctcctgccttagcctcccaagtagctgggactacagacacccgccaccacgcccagctaatttttgtatttttagtagagacgggttttcaccatattggccaggctggtctcgaactcctgaccttgtgatccgccagccttggcctcccaaagtgctgggattacaggcatgagccaccgcacctggctataaaatttcataagtagctcttaatagatttctcctgggcagtgctggtctaaacactttttttttttttttttttttttgagacggcatcttgctctgtcaccaggctggagtgcagtggcgcgatctctgctcactgcatcctctgtcacccgggttcaagctattctcctgccttagcctcccaagtagctgggactacagacacccgccaccacgcccagctaatttttgtatttttagtagagacgggttttcaccatattggccaggctggtctcgaactcctgaccttgtgatccgccagccttggcctcccaaagtgttgggattacaggtgtgagccaccgcgcccggccctgtaacacttttaacactgaactgtttgccttccaggtggtaaagagcaggtgcctttactgatagaaatgtcaccactcccttcatcccgccagccccatgtcactgacgcgtcctttccccttgctctgtggtaactttctcctaagcactcatcgccctaacatctgtcatacaggtatacctcagagacactgctggtttggttccaggtcgccataacaaagcgaatattgcaataaagggagtcgtgccttttttggtttcccagtgcacataaaagttatgcttacactatagtctgttaagtgcatgatagcattatgtctaaaaaaaaatgtacataccttaattttaaaatccatcaaggctgagcacagtggcttgtaatcccaacactttgggaggccaaggcaggaggattgcttgagcccagggatttgaaaccaggcaacaaagtgagaccccgtttctacaaaaaaattctttttaaaaatagctgggtatggtgacgcatgcctgtggtcccagctacatgagaggctgaggtgggaggctcacttgagcctgagagattgagactgcagtgagctgtgatcacaccactgcactctagcctgggggacagagtgagaccgtatctctcaacaaaaattaaaaaaaaaaaaaaaaaaggctgggcacagtggctcatgcctgtaatcccaacagtttgtgaggccaaggtgggtggatcacttgaggtcaggagttcaaaaccagcccagccaacatggtgaaaccccgtctctatgaaaaatacaaaaaaatagccgggtgtggtggtgcacacctataagcccagctactcgggaggctgaggcacgagaattgcttgaacctgggaggcgggggggagattgcagtgagccgagattgcactgctgcactccagcctgggtgacagactgagactctgtctcaaaaaataaataaataaataaataaataaataaatgttttattactaaaaaagttaacaatcatctgagccttcagtgagtcctcatcttgctggtgaagggtcactggctcagtgttgatgggtgctgactgatcgtgggggtggttgctgaagattggggtgcctgtgacattttcttaaaataagacaagaaagttttccgcatccatcgactcttcctttcacgaaagatttctctagcatgagatgcttgttgacagcaattttacccacagtagaacttttttcaaaattggagtcagttctttcaaaccctgccactgctttgtcaactaagtttatgtcatattctaaatctcatgttgtcattttaacagtgttcacagaattttcaccaggagtagaatccatctcaagaaatcactttctttgctcttccataacaagtaacgcctcatgcattgaagtttgatcatgaggctgcagcaattcagtcacatcttcaggctccacttctaactctagttctcttgctagttccatcacttctgcagtgtcttcctccagtgaagtcttgaactcctcaaagtcatccatgaggatcggaattgacttcctcaaaattcctattaatgttgatattttgacctgttcccacgaatcacaaatgttctttttgttgtttgtttgttgtggattgtttttttatttttaattgagttgaggtctcactatgttgcccagactggtcttgaactcttggcctcaagtgatcctcctgccttgatctccctaagtgctgggattacaggcatgagccactggaacagccacaaatgttcctaatggtatctagaatggtgaatgcttttcagaaagttttcaatttcctttgcccagatgcatcaaaggaatttatctatggcagctatagccttatgaaatgtatcccttaaatcataagacttgaaatagagaattacttcttgatccatgggctacagaatgaatgttgtggctgggcatggtggctcacacctgtaatcccagcactttgggaggctgaggcaggtgggtaacttgaggtcaggagttcaagaccagcctggtcaatatggtgaaaccccatcactactaaaaatacaaaaattagctgggcatggtggcgtatgactgtaatcccagccacttgggaggctgaggcaggagaattgcttgaaccctcttgaagacagaggttgcagtgagccaagatcacaccactgcagcgacagagtgagactctgtctcaaaaaaaaaaaaaaatgttgtgttagaagtcataaaaacaacattcatcttcttgtacatgcccattagaggtcctggataaccagtgcattgtcagcagtaatattttgaaagaaatcttttttctggctgggtacagtggctcgcacctgtaatcccaccactttgggaggccgaggcgtgtggatcacctgaggtcgggagttcaagaccagcctggccaacatggtgaaaccccaactctactaaaaatacaaaaaaattagccaggcatggtagcaggtgcctgtaatcccagctaccctggaggctgaggcaggagaatcgcttgaacctgggagtcagaggttgcagtgagctgaggtcgtgccattgcactccagcctgggcaacaagagtgcgacttcatctaaaatacatatatatatataacatgttatatgtaatataaattatatatataacatatatgtaatataaattatatatcacatataacatatatcatgtgttatatatatcacatataacatatgtgttatatatcacatataacatgtgttatatatcacacataacatatattatgtgtatatatgtcacatatattatgtgttatatatgtcacatataacatattgtgttatatatatcatatataacatatattatgtgtagtgtatcatatgtaacatatattatgtgtagtgtatcatatataacatatattatgtgtagtgtatcatatataacatatgtgtagtgtgttatatataacatatattatgtgttatatatctcatatgttatatataacatatattatgtgttatatattatatatatatttttttctgagtagatctcaacagtgggcttaaaatatcagttatccatgctataaacagacgggctgtcattcagtcttcattgttccatttatagagcacaggcagagtagattcagcataattcttaagaccttaggactttaggaatggtaagtgagcattggtttcaacttaaagtcaccaggagcactagctcctaacaagagagtcagcctgtcctttgaagctttgaagccaggcattgacttctcctctctagctatgaaagtcctagatggcaacttcttccaatagggcatttcatctacattaaaaatctattattcagtgttgccagcttcattaataatctcagctagatcttctggataacttactgcagcttctccatcagcacttatcacttcaccttgcacttttatattatggggacaccttctttccttaaacctcatgaaccaagatcttctagcttcagatttttcttctgcacttccccacctctctcagtcttgctgtgggcttgctgtggattaggctttggcttaagggaatgttgtggctggtttgatcttctatccagaccactaaaactttctccatgtcagcaagaagcctgtcttactttcttatcattcatgtgtttactagagtagcccttttaatttccttcagtaatttttcctttgcattcacaacttggctaacctctagcttatggccttttgtttgtttgtttgttttgtttttgagacagggtctcactccgttgcccaggctggagtgcagtggtgcaatcaccgctcactgcagccttgacttcctgggaccaagtgatcctcccacctcagcctcctaagtagctgagaccacaggtgtgcaccaccacacccagctaatttttttattttctgtagagatagggtctccctattttgcccaagctagtctcaaactcctaggctcaagccatcctctcacctcagcctcccaaaatgctcggattacaggcatgagccaccatccctggccctatctcagcttttgacacgccttcctcactgtgtttaatcatttctagcttttaatttaaagtgagagacgtgcaactcttcttttcacttgagcacttaaaggccattgtacagttatacactgacctaatttcaatattgttatgtctcggggaataggaaggcccaaggaaagcgggagagatggggaaatggccagttggtagagcagtcagaacacacacaatatttatcgatcaagtttgccatcttctatggatgtggttcgtggcacccccaaacaatgactatagtcacatcaaagatcactgatcacagaccaccataacagatgtaataattatgtaaaagtttgaaataccgtaagaattaccagagtgtgacacagagacgcaaagtgagcacacgctgttggaaaaaaaatggccctgatagacctccttgacacagggttgccacaaatcttcaatttgtaagaaacacaatatctacaaattgcaataaagcaaagcacaatgaaatgaagtcttcctcggccggtgtggtggctcacgtccataatcccagcactttgggaggccaaggcaagaggatcccttgagcccaggagttggaggccagcctgggcaacacagggagactccatctctagaacaaaacaaaacaaagcctgcttatatttattgggtttactctcagtctcccccacacagagatagggcctggcttgttattagtgctcagttgatgtttgtgaagtgaaatactaaggacttaaccactgcctgttctttgctgttcatgccctgacagcttttatgtgccagcacagaagaaaacaaggtgcaagaagagaatagtgatctctaagtcagaatttgaggaacccaaattagtaccagaaagctgggaggagaagagaaaaataaagtaaatcaaattaaaagttgaatgggccaagtgcagtagctcatacctataatcccagcactttgggaggctgaggtgagaggatcacttgaggccaggagttctagaccagcctgggcaatatagcaagaccccatctctacaaaaaaaattttttaattttctgaatatgttgttgtacacctgtagtcccagctgcttaggaggcagaggtgggaggatcgcttgagcccaggaggttgaggctgcagtgagctgttgttgcaccactatactcaagcctgggtgacagaataagtccctgtctccaaaaataaaaataaataaattcattttttgtaaagttgtatgtcatggcccctgcctactctggcttcatgacttgctgcttgaacctcaccatccaaatcccagtggtgacaccatgtcatttcttgaatttgccaagccctctttcagtcccaagctctctgtcatggccactctcagcctggaaagttctttccccactggccagatttctccccctcatctatgggaacttgacttgaagtagggggtatcccaggccctggactagttaacacgacctgctgtgtgcccctcaaagccattgtcttcctagctgagaaggcatcacacctgcaacagattcactcattgtgtgcatgtttttcttaaccacttctcttctgcatcagctccatggggcagggatagtctcatatgtcactctacccagcacataggatacgctcagacgcccacttgtggatggtggaaaaggtcagcccaacctaatatgcccatctctcctctaggggtaatcttgagaaaaaaagttgggaacttgctttgtgttagtttaggatgacccagaatagatcctgaaacaagaatttagggcaatccttgtgcaagtagttcatctgagaggtgaccccagaagggttggagaaggagaggggaggtggggcaaggaagggtgagttgtcctgtaggcaactgagctccgtcctactgggagcccacgtggaactcacctcttaagtgatccagaatgaagggtgagggagctgcggtattgatccaccaactcccagcaatctttggttgagggctgctcccttaaagttcattccctgggcctgccccagatttggagacagccctaaggcaagaggtacagataccagttggccacagactgaagtgttaagacccaagcccctggataaaactgaaaaatcaagccagatgtggtggttcccacctgtaatcccagctactcagtaggctaaggcaggaggattgcttgagcccaggagttcaatgctgtagcgagctatgattgcaccactgcattccagcctgggcatcagagcaagaccccatgtctaaaataaaaataaactgaaaaatccccaagttatttgctgtgaccaaccttccattaaccacagaccctctggtattcagcatttcttgtccattatatgaagttctgatgacagtctcttttattgtattgtgccttgaccacgcactgtacatcacttagctctgaaatggacatgttcaggaaacagggccaggtgggaccctgtgtttcaacagcaatacttttacaaatgaggtctcatgacagggtcttgctcggagggtttctatggaagcctcatcccacctactgctatcatccttactaacttgcatttacaaaagggactctttttgaccagaggcttggggtctgtagctgccttctagccagctgatgctggctggtccacacaagcaggatcacacccatttttttgttttcttatttatttctgaataggttagcataccggtaacctgtgtgcctggcattgtgctgaccactttttgtcaacttactgaatcctcacaacccttggaggtattgatactattgttatccaggttatacaaaagggggaaactgaggcacagagcagggatgtcccttgcccaaggttacccaactggaaagtggcagatctgggatctgaacccatgcaggctgggctcttaacactgaactactttcctgccatttgttaaagagccacaaaccaggccaggcaccatggctcacgcctgtaatcccagcactttgggaggccgaggcgggtggatcacctgaggtcaggagttcaagaccagcctggccaacatggtgaaaccctgtctctacaaaaatacaaaaaaaagtacccgggcatgatggcgggtgcgtagtaatcccagctactcgggaggctgaggcaggagaatcccttgaacccgggaggcagaggttgcagtgagctgagatcacaccattggagatcgcactccagcctgggcaacagagtgagactctgtctcaaaaaaataaaataaaataaaataaagagccacaaaccccgaaaggtctgccattcccccagggccccaggccaccccacaatctattgtcattgtaggttgtgaaatatactgaatgtcaccccaaccttgagccatggggaagattccatttctctcattgcaacatttgtgcaacatgaaccatctgttgggggtcttcgtaaatcaccttttatcccgtgaggcaggtactgttaagaccattttacaggtgacaaaactgaggccagtggtgtcgagtcacctgcctgtggtcacccaaccaatacaggacagcttggaatcccaagcacccccgccctgctgtctgacccccaaaacccaccctctgttctccattctggcttctttctttcagcatcttggcgacagttgggacggagtttgacctacggacgctgagggcagttcgagtgctgcggccgctcaagctggtgtctggaatcccaagtgcgtgagtttccgaccctgacaaggggtttgctcacgggccccaggagccctcagtttcccctatgcagagcatctcaggaggccacatcctgccaccagcctgtgtgagggcagtctcttctttgggactccctatagggaaccccctaggaatatgactgtagctccccatgagctcctgaaagcaaactaggagccacacccatttattgagcacctactgtctatcgggagccatgctaagcaccacgtgtgatctcattcagtactcacagccctatgaagttgataggactgatgtctctattttatggagggggaaactgaggctcagagtggctgaaacattggagcagggttttgtggctgagaagtggcagaactaggagtgagcaagtgtgactccaagcctgggccgtaccactggtggcaatgaccattcccatttaatgagtgcctgctgcgtgcagggcactacagaaggactttacatgaattaccttatttcatcctcacagtcacccagcgaacacccattttacagatgagacggttgaggcttaaggaggttaaattactcacctgaattcttagagtggacagtaatgagctctaaaattcatactcattccttgctgctttctcattctccacagatacatctagtccccgtttaagggtggctgccatatgcagggtcaagattaagtgtaggttgagccaaaaaaaaatgtaaaaagcaaaaataaaacagggctgtcctttttctatcttcttgtcttggttaataataataatttagccaggcatggtggctcatgcctgtaattccagcactttgggaggatcacttgaggccacaagttcgagaccagcctgggcaacattgtgaggaacaccacccccacccccccgccaatatctacaaattttttttttttttttagaaattagccaggttgactgggcacagtggctcacacctggaatcccagcactttgggagaccgaagcgggcagatagagcgagctcaggagttttaagaccagcctgggcaacatggcgaaaccctgtctcaaaaaaaaaaaaaaattagcaggcatgatggtgcacacctgtagtcccagctacttaaaaggctgaggcaggaggatctgagcccaggaggtcaaggctgcagtgagctgtgatagcaccactgcactccagcctggacaacagagtgagaccttgtctcaaaaaaacagacaacaaaaagtttaaaaacaaacaatttataggctgggtgcagtggctcatgcctataatcctagcactttgggaggccaaggtggatgggtggatcacctgaggtcaggagttcgagacctgcctggccaaaatggggaaaccccgtctctactaaaaatacaaaacttagccgggcgtggtggcgggcatctataatcccagctactcgggaggctgaggcaggagaatcacttgaacccggggggcggaggttgcagtgagctgaaatcacgccactgcactccagcctggatgaaagagtgaaactccgtctcaaaaaaagaaaaaaaaaaattaaaaagcacttactatgtgccagacattattctaagtatttccatttttttaaagtcctttatcctcccaacaagcctgtgaagtagtctcttttattatcaccattttacattttattggcttcgttcttccggttcattgctacccaggtttaaagagtaagatttcccagaggatcaccagcaggatctttttgtagaaagaagacacttctatccaaggtctctgcaagatcccagcagatgcctgcatcatattaaattaagggccatcccaaatctaatagtcaaaagagccaggtgcagtggctcacacctgtaatcccagcactttgggaggccaaggcaggacgattgcctgaggctaggagttcaacaccagcctgggcaacaaagtgtgaccctgtctcaaaaaatatatgtatattataatagcagtagtaacaagagtctctgtttaatgaccacctatgacttaccaggtacttcactgtgtgtgaactctctcatctaatcgtatgagggaggtactattgcagtccccatttacagatggagaagctgaggtttggaattcactagtaagtggatgactaggtcaggttcccttgaagcggatacttaggtgggtgttcagatgcacctgctttattgggggacggctcttgggagagacagcaggagatcagcagggtggggctggggaatggatagagcagggacgcaatttcagctggagtgtgtgtgacaccagagttgtcctccaatgcatggcaaggatgccggccttttgtacttctatagtcagtcactgtggatgggaggtagagacgcagtagctcccaggtgagatagcttttgatcaccaagggcaattctactaagaagagaggcagctgggaggcattagcaaccaacatccatagcagctggagggcgggtacaccagaaagaaaatgggatcttggccagacaccaagagtatccagcaccttaaccactgcaccacactgcatctgttagcacccacattacattttttttttttttttttttttttgagacggagtctcgctctgtcgcccaggctggagtgcagtggcgagatctcggctcactgcaagctccgcctcccgggttcacgccattctcctgcctcagcctcccgagtagctgggactacaggcgcccgctaccacgcccggctaattttttgtatttttagtagagacggggtttcaccgtgttagccaggatggtctcgatctcctgacctcgtgatccgcccgcctcggcctcccaaagtgctgggattacaggcgtgagccaccgcgcccggccagcacccacattacatttttaagcccttggagtggcatggcccctcgagctatcctgacagcttccctctcttactgtggtctccacccatcaagagccatgggaagttcctgcaatcaagaagcaaagcctcaggctatatgtttgaaccttcattttgatcatagactttcctagtagataccatagtggttacaaacataggatgttgtcatcgttcagacctgagttaatagcctcaagaaaaaaatggtagtggaaccaggtatggtgaagtgtgcctgtagtcccacctactcgggaggctgaggcaggaggctcgcttgtgcccaggaggtcaaggctgcagtgagccgtgatcatgccactgtattccagcctgggtgacagagcaagcccatctcaaaaaaaaaaaaaagccaatgataggcagagaaatactaactaaggctcttgctctgtcgccaggctggagtgcagtggtgcaatcacagctcagtacagcctcaacctccccagactcaagcaatcctaccatctcagcctcccaaatagctgggactccaggcacacagcaccatgcccagttaatttttttgtattttgtagagacagggtttcaccacgctgctcaggctggtctcaaactcctgagttcaagtgatccacccgcctcagcctcccaaagtgctgggattacaggtgtgagccaccacgcttggccagctattattattattaacattcttcgagtcttacaacagtggaacttttagtgcaggatgcgaatttcagtattaaccccttcctctcccaaaaggatttgaagcccagagtaattcagccgccatgaatgaaccatttgttagatgagaggctactggaggctgagcttggtaggataagagcttgcatggggtccctgattgatgacaatacccccagatttaggtcttcagatgcccagttgggtgtgtcttctgttccactgtgtcccttcggggactgttccctgccttctttctttttgagatggaatctcgcactttcacccaggctggagtgcaatggcgtgatctcagctcactgcaagctccacctcccgggttcacaccattctcctgcctcagcctcccgagtagccaggactacaggtgcccgccaccacgcccagctaatttttttgtatttttagtagagacggggtttcaccatattagccaggatggtctcgatctcctgacctcgtgatctgcccgcctcggcctcccaaagtgctgggattacaggcgtgagccaccacacctggccccctgccttcttattcaccaccatctttctgaattgggttgctcagaacagagaaagcaacatcagcacatgggcaaacatggggcttcatttcagatggacctgggttcaaatcctagttctgcctttttttttttttttttttttttttgagacagagtcttgctctgtcacccagactggagtacagtggcgtcatcttggctcactgcaacctctgcctcccaagttcaagcaattctccttcctcagcctcccaagtagctgggattacaggcgctggccaccatgcccagataattttttgtatttttagtagagatggggtttcaccatgttggccagacttgtcttgaactcctgacctcgttaatccgctggcctcggcttcccaaagtgctgggattagaggcgtgaaccgccgccgcgccctgcctagttctgccatttctcatgcattctctgggtgaatcacagcatctctgttagccttgcttcccacttctgtaaaatgagagtgactttacatgtatggccacctcaggggcttgtcactagaagccagtgaaataatgttgagtctggttccttggggttgaaattgggaccgccaaccgctttcctacccagagcagcaactagcctatatggcggccttttatgaatgaggaaaagacaccgcctcttggcagaaaaaaaaaattaagaaaatggctccctcttctgggtgcaagttgcccaacacccaggaatatggctccaaaagcaatggactcccacccctttcttgcccaaaagatcatcaaatggaacagcatgtcaaatacctttattaagtactttaaagttggctgggctctgtggctcatgcctgtaatcccagaactttgggaggcagaggctggaagatcgcttgaggtcaggagttcgagaccagcctggataacatagtgagaccctgtctctataaaatatatatatagatttatttgagacagcgtcttgctctgccactcaggctggggcgcagtggcacaatcatagctcactgcagccttaacgatcctcctgcctcagtccctagagtagctaggactacaggcatgcaccatcatgcctggctaattaaaataaataaataaataaatactttaaagttaaaagtgctttttaaaaaataataaggccaggcgtggagactcacgtctgtaatcccagaactttggaagaccgaggcgggtggatcacgaggtcaggagatcgagaccatcctggctaacacggtgaaaccctgtctccactaaaaatatgaaaaattagctgggcctactcgggaggctgaggcaggagaatggcgtaaacctgggaggcggagcttgcagtgagccgagatggcaccactgcactccagcctgggcgatataacaagactctgtctcaaaaaaaataaataaaataaataataataataataggggccaggtatggtggctcacacctataatcctagcactttaggaggctgaggagtttgagtccttggagaccaggggtttcaggccagcctgggcaacatagcaagaccccatctctacaaacaagttttaaaacttagccaggcatggtggtgcatgcctgtagtcctagctattgcagggactgaggcaggaggatcacctgagcccaggaggttgaggctgcagtgagctgtgattgtgccactgcactccagcctgggcagcagtgcaaaaccctgtctcaaaggaaaaaaaaaacctaggaagtgttgttcccatgataaggatcagcctccgtgtggtgcttccttcaccattgcccaatccccaggctcctgggtgcttaatgttccctcaggaacacacctgctttgtctgggagagacctgggcgtcttggtggcggggtttgggggtacttgctcatgggcttatggggcctctctctgtgtccccccaggtttacaagtcgtcctgaagtcgatcatgaaggcgatgatccctttgctgcagatcggcctcctcctattttttgcaatccttatttttgcaatcatagggttagaattttatatgggaaaatttcataccacctgctttgaagaggggacaggtaggtccacggagcatgatgcatctttccagttttctccttcagggacaagctcttgggaggattaggcaggggtgtgcttctttctcctggcagctgggaggaccgtctccttcagagagcactacaggagaggcagtgagtgaaatagcctctgagatcttagctgttgaaaggggtggggttccacagaaggtgacccagcagagaaagagtttatttgggaatgatcccaggaagcaccatcgggggaatgaggaagtgagcagagaaagaagggatcttttaaagagtgtgctatcaagcgggttaccacttaaaactgggactggatccccctgggcacctctgggagacagcaaagaacacacaactcagctggtcacggtggctcacgcctgtaatcccagcactttggggggccaaggcgggtggatcacctgagatcaggagtcagagaccatcctggccaacatggtgaaaccccatctgtactaaaaaatacaaaaattagctgggtgtggtggcaggcacctgtagtcccaattactcaggaggctgaggcaggagaatcacttgaacccgggaggcagaagttgcagtgagccaagatcacaccactgcactccagcctggcgaaagagtgagactccatctcaaataaataaataaataaaaatataaataaaaaaagaacacacacctcagagccgtcccagccaaggggcaagggagctggggtatttatacactggcttctttttgacattggtgaggactgctcctagagtgggaattaatgcctggcacatctggctgagtggaacaggtattctgggtgctttcagacctcgaccagtcctgacttctaaagcaagcaagaagtggggagagttgggccagaaaagggttattgcctcaatgcattgtgagtggtaccttgtggaaggtgagagacagagaagattccaggcacaggtgccatgctaaacgatagttctcatttattataggaacccatggatttattttgttctctgccctgagtgctgggtgagagtactggatgagtcctcctggtctcccccaacccccaggatgtaccagagataccccaattgggagtcctggcaccaaccaatcagaacctagcactcagcagcattctgcccctccctgactatgcccacattaacccttcagtggctgggtctgggggtagggtgagccccggaaaagccaggcagcgcagagacactctcccagggctcagctctgaaccagcagtgtggaagcagtgtgtccaccacgatccacactcaggaaccaaatagcccttggatacgttttcagttaaatctttgccatccaaactctagctgcttgctctctaaagctccagaatgaaatggaatcaagtaggaagggatgccttcagtatttcagtatttggaccactggccatctgggtgcagacagactgaatagcagttctggttctgatgatttgggtcaagggagctgtgaattgaaggagtggatagaaggaatcaagaagcccaaaggggaacccaggtgggcagagaaagaggtttcaggccccttatttgggaaaggcagccacagaagaagattctgtctgggagtggatttccacccaccctctccacccagtgacccccaagtggatccgcagaggcagcccctgagccctccctccccactcctccccacggggagggaaaacccactggggaaggtttatttgcaatggttggaggtttgggtttttttgtgggttttggtttgttggttttttttttcctctttttctcttgctcctcctgtctctttctctcctgggcttgtgaagtttgctcaatatggaatgtcctaattatttctttccccgatgaagaaggtgttaattgaggcagagctatttctgctcctggcctcgtcacccaggcggaaatgcgagagagagagagagagagagagagaatgaatatggggcagggcctcttggaaaaatcagccgtgagcagagaaaccaggactcctggatcctaggtttctgtgaagttttattttatgtttttctaccctagactagctaaaggagaagaggccatggggttggcttgggtccgagtggggttttgaggggacagatgtgggtggtgccaccagaggggaggaagcctcgatttaggagaaagactgaaaagctagctcacgattaaaaatataagacgtgtgagtaagagacagatatatacagacacccaggcagtgggttaattttaaaatgtatttataaccgaattcctcagacactctggacgcttgtttttctagaagcaacgctcagagtgtttcgtgtcggtggttggggggttgagggggattgcaaagctgctaaagatagacccgttttcagtagcattcctcagtgtcgggagcccagttcctgtgtgcccagcaccgtgccaatcgcttagaaggaagcaaagataaagtggaaggcttcctgctttctaagagcttccaaaatagttagaggaaacaagacccctcatttgcagccatttttaacagtgaaggctaatgtgtgattatacccacgcccccctaaatatgaaaattcagtagctattgtatgcctgaaaggggccaggtgcagtggctcacacctgtaatcccagcactttgagaggctgaggtgggagtatcccttgaggccgttagtttgagaccagcctaggcaacatagccagaccctgtctctgctaaaataaaaatttaaaaattggccgggtgcagtggctcacgcctgtaatcccagcactttgggaggccgaggcaggcggatcaaaaggtcaggagttcaagaccagcctggccaacatagtgaaaccccgtctctactaaaaatacaaaaaaaataaattagccgggcatggtggcgtgtgcctgtagtaccacatacttgagaggctgaggcaggagaatcacttgaacctgggacatagaggttacagtgagccgagatcacgctactgcactccagcttgggcaacagagtgagattttgtctcaaaataaaaaaatttaaaaattagccatgagtggtggtacatgcctatagtcctagctactcaggaggctgaggaagaaggatcacttgagcccaggaattggaggctgcaaggctgcagtaagctatgatggtgcccgcactccagcctgggtgacaaagtgagaccctgtctcaaaaaaaaaaaaaaaaagagagagaggaaggaaagaaggaaggaagggagggagggagggactggggctgtgttaactgggctacacaaagaggctacatggagggtgggaattgagccagacttggacatggcgtggagacagagaagattccaggcacaggtgccatgctaaacgatagttctcatttattataggaacccatggatttattttgttctctgccctgagccttatgtttaaaagatttttgccttccaacctgtatttatcaaataatagttcatgtaccaagtccagcataagtgaggaaggcgtttccaacaacttaagttcatggcgaggctagacttggagtttctattcagccagagcttgaaaggccaacaagattcattcattcagcattggtttatttccctctgctgtgtgctcagtcaagggagcagagaattggtgctgcgaagtctgtagcacatacattgagagatatttttgttgagtaggaagcttgagtttacacacactcagctgtttgttttcttgtccgacaatgccacggtcgtctttgaaaaccttcaaaagcatcgctcacagaataaggtcctctcagacccgctgtgctggtaaaatgaggacactcccagatgtgagctttcctgcctccctaccccatcaataccttaagatttggactgacctttagcgttcagcctgactgccacctccccaggaagctgtctttggtttccagcaaaaggggtgtctgttggcacgtttctctctccttgtggcattttcacagcctgcctcctgctatttggggagaaagctcagctcctgttccttacccttaggcaagggtaggaactgtgtgtactggtgtccctcacccccagaacagctccctgagcccagtacatcccaagaagaaaaaaatcagcaaggcttataggagaataacacaatgcgcttgacaaatttgtcctaatggatgtcggaagaaggctgcacttaccagctacaccatgcacacggcacatttactaaaactgactatattatggaccataaagtttgtctcaacagaggtcaaaaagctgaaaaaaatacaaatacaaaacatattttctgaccgtaatgcaattaagctggaaatcagtaacaaaaagagaactctaaaagtgtttgcagattaacagacatgcctctcatttatggatgaaatgatatgatgtctgagctttgctttaaaaatattctaggctgggtgcagtggctcacgcctgtaatcccagcactttggaggccgaggcgggcggatcacttgaggtcaggagttcgagaccagcctggccaacatggtgaaaccccatctccactaaaaatacaaagattatccaggtgtggtggtggccacctataatcccagctacttgggagcctgaggcaggagaatcccttgaacctgggagtcggagattgtagtgaggtgagatcatgccattgcactccagcctgggtgacagaatgagactccgtctcaaaaaaaaaaaaaaaaaaaaattctagtggcaaggcaaagtgtttggaggggatacagaggaatagatgaaacaaaatttgccagaagtaaataggtaagtgtctaaattggtgataggtacatggtgaatcattatattgttttatacttctctctcgctctctctctccccccgttctctccctgtcttcctctcccctctgtcttcatatatatatatatatatatacacacacacacacacagacacctaataagtttttttaaaaaacaaatacatctaaattacccataggtcaaagaagaaataataatggaaattagaaaatattttacttgaacaataatgataatgcatgacaaaatgttgagatgcaggtaaagccacacttaaaggcaatttatagccttaaaggcagttaatccatccatctcaaaagtttaggaaaagaatagaaaaaaaaaaaaaactcatggaaaacataaagagaaaagtagtaaagctcagagaagaaattaatcaatagaaaaccaataatagacccccaaagccaaacattgatctctttgaagactgatcacgtttgtcccaaaagttattcgttccaacagcattatagagtcactggtccctatttctcagagctggttttccctgctccttcccctgacttttctccccttcccttttgtagatgacattcagggtgagtctccggctccatgtgggacagaagagcccgcccgcacctgccccaatgggaccaaatgtcagccctactgggaagggcccaacaacgggatcactcagttcgacaacatcctgtttgcagtgctgactgttttccagtgcataaccatggaagggtggactgatctcctctacaatgtaagtgatgctgggacagtgtgtgtggacaatcagagtctcagggaggtggcctcctgggaccagtgagactccaaggctgcaatggagggaccctgagctgggaaaggcagcccaaggacaacacagccccactgaagctggcctgaggctcaggcttttgaagattacaggggctcatgagcagaactctaactatagggcatagaagtctggagggcccccagatgcaacatcatttttcattgtgcaagtgtttagatataattttagatttttgaatacggaaaggttatgtgatccaaaaaccaacacagataaaagatagagtaatatctttggacgtaggcgaggggtccctgccctgaggctcacccagtccttctccagccataccactccccgtgggatgagaagttcctggagccaaggggatgtgtctaccaagagcttgtgccccactttgtaggccatgttttaagttaccaggatcctggaattccctgcccatggccagattccatgaacttgcgtgcaattctcatatggatctgttcgtaacccaactgagggccaaggacatccgaggggtggctgttaacacaaatgtggccagagcttggatgtacaagctggaatgcccacacatatgtgtggagcccctctggcaggacagagccatgactaagaagagaaagggacaggacagggctggctctccccacaccttgacccagtgcagatatccggattctaaattccaccctgaccttccaaagtgtaaaggaaggtatatttgcaaagtagaagcacacagcatgttttatttagttaccttttcaatatttccccgtagtatgtggtctgcttttgtactcttgccctagatcttaaaaatgttagggatgtttctggaaagatgtatccctgcccccacttgcatgctacttcctcttcccacaatatgcaacccctttagttcctcagaatatccttccaatgtttatttatgcaattataattataagcataatcgaatctatgtcctcccccctctttcttatcccaaggagtagcattctatacatgctgttcaattctgtgatttttgttttctcataaccacacgttctagagatctttccactgcaggacatggacagtctcttcacgggtgcacactagtatgcccagctaatttttgtagagacagggttcttccgtgttgcccaggcaggtctggaactcctgggctcaagcaatcctcccgcctctgcctcccaaagtgctgggattacaggcgtgagccaccacgcctggccttctttattcttttgcacagctgcatagcattctattgtgtggctgcccatagttttatttgtttgccattaagagaaatgcttgactggcttcctgtccactgacatggaacatgatgctgctctgccaggagcatgttgcacgtacctcttcatacttttgcagatatagctagggggttggagggtctccattcccagaagtgggattgcaggatcaaagactaaatgcatttataattttatttttggggaagatttttgttttgtttttttggagacaaggtctccctctgtcgtccaggctggagcgcagtggtgtaatcatagctcactgcagccttaaactcctgggctcaggtgatcctcccaccccagcctcctgagtagctgggaccacaggcacacaccaccatacctagctaatttttaagaacaattttatagagatggggtctcactatgtttcccaggctgctctcagactcctggcctcaagcaatcctcctgcctcagcctcccaaagtgctaggattacaggtgtgagccactgcacccagcctaaatgcatttataattttgatagatatttaggtgtgcaagttttaaaccccactctgtcctcaccacagttcaccttccctcacctactatgcaggtaagcagtccccaggcaggtcacttgtcagcagctggagtggggcagagccaaggattcaggatcaaacacaaggatgccacaactgtagtgaccccatagagcaccctggggctgctccatacacacagctctgttgaccagtggaggtctcctcttcacctgccctaagggctgaaattaccattgaagtttaggccagcggttggcctgacccgggagcaatacctggcttcctcctcctgtacatagagaagctgaactttcctcttggtcctagtgtatgttccttaacaacccatttatgcctagtgttccattattggaatgctaatcctgtgggagttatttacatcctgctgctcaaggtcatcactaaggtcggatttttcacacacacaaaaattgcaacctccggcataaatgggttaaggaatttccccacttgtgggtggagggagatttgcaaaaactcatccttgtaatcctgatcaacaaaggcccgttttagttgggagtaggcagcaaaaggagccacatgaacagttgcgcctgtcacgcactgcacaagaatgtcattcatatcatagacaacatacgatttctactgttatcctgataatttattgacagaaaaaaggatgtggggaagggacatggtgttctaatttgcatgaaaacctcgtctgagtgtagcatctctgggaacatgcagcagatccgagctcaggccctctcttggccgtcacctgcaaacagcttggacaaagggtcagcccaattggccaaaactcactggggaatttttgtgggttctaggtttttactttgcaaggctggtgtgagaggaggttccagcaggaaatgaaccctcctgagagggaaagagactgggaaatggagaaggctgggaactcagggagagaatgggagtggggaatgggagctgaaaaaaattgtgagcataaaaaagggatatgtcacagggttggatgaccagagaaagcgtctgggggttcagattaagatgctgggggcgtgcccagtggtgggacaggaagcatgaatttccagagggctcggttataaacatcattgtccaatgggtgtttcccttggaagcctctaagcttagagctaagccacctctggggacacaaactgagtggttaagagcagagactcaggtgtcagcctgtctgggttccttccgactcttccacttccttgctgtgcagccttcggcaaggtgcttggcctctctgtgccactatttccacatgtgcaaaacgaagagaagcatagtcccacctcacaaggcacgaggactaagtaaggtggattcgcatgaagtgtttagaactgatcctggcccggggtgacctccgtgtaagtcaaattccccaccctgcatggtgttccttttagaaatgtgcatgaatttttcattagaacagctccagcagtgcctgaggaagtggagtgaggtgtgagaggtcttactttattcccctcgctggccctgctattaaccactaactcagagtagctttctagcactttccacacatttacatcccaccctcgtcctttggttagcagcccatgcaatgatttggccttaatgtgaacctagaacacagcttctcgcccagggatgatttctgcccccaggggacacttggcagtggctgcagacatttttggttgtcacaactggatgggaagaaggaggatgctattggcatcaagtgggtaaaggccacggatgctactcaacattctacaatgcacagcatcccccacctctgccccaccatagagaatgatccaggcccaaatgtcagtaaggtttctgtcaggaaaccctgggtcagaagaccaaggttccttgaggacggggatgccttatactgcaatcagctgtcactctctgcctctctctggggctgctgtgatcacctggcctgcatggacaacccctaggagcagcccccatccagtgcctggagaagtcagtggataaataccccagctccctccctgtcgggcgttttgctctgccctgcatctctccagtgggatcaggctctggttgcccgcagggttaacctggtcacgtacacacccttcacttgccaccttcccttccctgtctggtatttcctgggatgaacttttagatttatttcctggggctgctataatgaagcaccacagactgagtagcttaaaacaacaggaatttatggtctgacagttctggaagccagaagtccaaccccaagatgttagcagagctgacaacacgcccctcaaaagcctccgggggaggatccttctttgcttcttcctggcttttgctggtttcccacaatctttgggattccttggcttctagagccttcattctccattccagtcttctgtcatctaatagcatcctcccagcccgggcacagtggctcacgcctgtaatcccagcactttgggaggccgaggcaggcagatcacttgaggtcaggagtttgagaccagcctggccaacatggtgaaaccccatctctactaaagatacaaaaattagccaggcgtggtgggcgggtgcctgtaatcccagccacttgggaggctgaggcaggagaatcacttgaacccgggagatggaggttgcagtgagccaagatcatgccactgcactccagcctgggtgacagaatgagactccgtctcaaaaaaaaaaaaaaaaaaaaaaagaaaaagaaaagcatcctcccttcgtgtgtctgtgtgtgttctcctcttcttagaaggacatcagttgtattggatcagaacctaccctactccagtccaacctaattttaactaattacgtctgcaattaccctatttccaaataagatcacattctgaggtaccagggggttaggacttaaacatttttgtgtgtgtagcaggaggacgtaattccatttataactcctcctaaataaaacgacttgcatgtgaactcttgtctggggcttcccaaagtgagataacccctctctctacccctaaaacaacgagtagcgtctgtcaatgccagggtgcaggggctaaggtgcccatctttgagtttctgctgaggaggacacagctgctacgttggagcactcttgggttctgccttcgtgcccagccatctcccttgggctagccctgccctgggtctatcctagaatgagcctcgatctgtttggccataggcaagcagagtgtctggaaatctttgtcctccatgactggtgctggagccgaagccagtgggtgtggccttgccagccaactccatttacccagctctgaacaagctagtagttgagatcaacggagagtccagacagtcgctccaagcatcttggaatccatggacacaggtgtaccgcagaggcttcccacctgggtaggcagccctttgtaagatcctggcaccacatttattctcttaacatcctttcagttatccagtaatcatttattgagcacctactgtgtgccaggcaatgattaggtgattggagacactgcaacgaagaagacagactaaaatctccaccctggtaggagagacagatgcaaatggtaaacatgataaataatcaatcacccagaaagcaggagacactaagcaaatgtgtatgtactatgggaagcccaataggaacgaaagctacacaagagaacaagtgatgggtggttccttagtctaggtcaggcaatcagggagggcttctcagaggaggtgatgtttgagcagagaaggagggagccaggcagatgttttggaaacagcattctcagcatggagaacagtggcagctcacctacaggatgtgtttgattcccttccagattttgtattcgtttcttgtttttctcccttggcttcctggtttaaatgccttttgaagaaatctaagctcaactaatcagcgatgctgttgaaggtttatatcaggatatgcatcccagagttatttacaaaattagaacaaaactggaagcaattgaaagcctgacaataggagatcagttaaataccgtatggtccttccgtatgatggcatattatgtcatcattaaaaatcgtctgctgggagaatattaaggatacaggggaaaggctcaccatataatgatgagtgggggtgctgggcgcagtggttcatgcctgtaattccagcaatttgggagtctgagatgggtggatcacttgagcccaagagtttgaggccagcctgggcaacacagtgaaacccaatctctacaaaaaaaaaaaaacaaaaatacaaaaatcagccaggcatagtggcgtacatctgtagtcccagctactcaggaggctgagacaggaggataggatcacttgagccctggagtcagaggtggcaataagccgtgatcacgccactgcactccagcctgggcaacagagtgaaaccctgtcaaaaaacaaaacaaaaaaaatgatgagtgggagaaacaagtttttaaacagggatcaaggaggccaggcatggtggctcacacctataatcccagcactttgggaggccaaggcaggcagatcacctgaggtcaggagtttgagaccagcctggccaacatggcgaaacctcatctctactaaaaatacaaaaattagccaggcatggtggcgggcgcctgtaatcccagctacttgggaggctgaggcaggaaaatcgattgagcccaggaggtggaggttgcagtgagctgtgatcatgccactgcactccagcctgggcaacagagcgaaagctgcacgagagaagaagtgatgcatggttccctagtctaggtcagccaatcagggagggttcctaagaggaggtgatgtttgagcagagaaggaggaagccaggcagatgttttggaaacagcattcccagcatggagaacagtggcagctcaccctgtctagaaaagaagaaatgataagaggggaaaatgagtttttaaaaaggaatcaaggggaggtaaaccttatgatctcaaaggtacaaatatgaaaatataagtaaagaaaaactggaggacactgtaccaagctgaccttcgggtggtgggatttgggaatcttgatattctcaatacttctttgtatcttcaaatttctctatgatgatcacagtttactttttttttttttttttgagatggagtctcactctgttgcccaggctggagtgcagtggtgcgatcttggctcacttggctcacctctggggttcaagcaattctcctacctcttcctcccaagtagctgggactataggcatgcaccagcatggtcagctaattttttgtatttttagtaaaaatggggtttcatcatgttggccaggctggtctcgaactcgtaagttcaagtgatccaccaacctcagcctcccaaattggcttgagccaattaaacttgtcttgctaaatggttagcggggagaaagaagaaggtctcgggtcattcctagaccaggaggcagggagaaagggaggagaatgaacctttcttaggcaaacagtgtcctaggtgtccttatcttacataatctgtcgagagagtcacactaaaataaatcattgattgattgattgatacatcaataataaatggccagccttggtggctcacatctgtaatcccagctacttaggaagctgaggtgggaggattgtttgagacaaggagttcaagaccagcctgggaaacacagcaagactcatcttaaaaaaatttttttttttaattagccagatgcggtggctcacgcctgtaatcccagcactttgggaggccgaggcgggtggatcacgaggtcaggaattcgagaccagcctggccaacagggtgaaaccccgtctctactaaaaatacaaaaattagccaggcgtggtggcacacgcctgtagtcccagctacgcaggaggctgaggcagaagaatcatatgaacctgggaaacagaggttgcagtgagctgagatcacgccattacactccagcctgggcaacaagagcaaaactacatctcaaaaaaaatgttttttaattagccgggtgtggtggtccatgtctgtagttccagctacttgggaggctgaggcaggaggattgcttgagcccagcagttcaaggctgcagtgagctatgatcccgccactgcactccagcctgggcaacagcaagaccccatctcttaaataaacacataagtaaataaatgatcatttttattttattattaaatacacaagataaatgaaaaacaggcaaatctttcttacaaaagaattccatttaaagtatgtaaacttcactccccactgccccaggaggtggagactaatctcccctactttgagagtgggctggatttagtgactcatttccgaagaatagagtaggtaaaggggaaaatagaagttttatagcggaggaacagatagataccactttaaccaaatgatgaagattagtatcccccagggatgtggatattatgtaacccttgattttatgcctatatagcgttcttcccaaaaactcctaatcccagttttttggggttttgctctgtcttctaagctggagtgcgatgatgcaatcatagctcactgcagctcaaactcctggtctcaagcgatcctcccacctcaacctcctgaatagctagggctgtaagcacataccatcatgcccagctaattgtatttttttggtagagacatgttctcacacattgcccacgctgtcctcgagctactggcctctagtgatcctcccaccccagcctccagagtcactgggattataggcatgagccactgtgaccagcccagaatttttttttaaggagttgtgatgtcgtttaagagatgtgattcttcataacacatcaacaacaagtcccagcgatgggttggataagtcttgggatttcatgggagtattaagcttaaaagactttgcatgatatctgtgaactatatgtgatttctgttggtaatgggggtcactgattctgcggtttgccacctccaatcatcatggaagaaaatgttccacttccagtgaaagtaagaggaagtaaaggggtaattattttctatctaaattcacgaactccttgaattctgtccacagacccctaagtgtttcctccccaaggtgaaactgagagaatcttgccagtgccttccgcagtcactgtggctagaaaacccctcagaagaggtgatagtttagcaggtaactggagttctcaccatccgtgtctggctcagcccccatcacaaccagttacccagcccaaaatgtcagtagtactgaggttgagaggctctgctctaggaggccaggcctctcagaggaaggaggattggggtactggctgggcctcaagatgaacctaccccctaagagctttgggatggcgtgagtttctgtccatacccaaggactacaaatgcaggtttactggaaattctgtgccaaaagtgaggtccaactcacttctaactgctacaaaacaaacctccatcaacatagcccatctctgttcttgacctggaagctccaaggtatccacatggctcccatgcccactagacgggcctcttccctggaccttcctgggccagagaaggctctgggtagccttgtggaatcaagatgggtgatcagccacttcctctgtgccaccctgttttggctacttccctaggcatcagcctgggattccttgatggtaaaaatataaaactctctgagctagggcctttaatatccccattttacagatgaagaaactgagtcccagagctgtgcacagcgattgagagtcagaattcagctctgtctcactcagtgtcaacatcctcagattctgccatttatagcctcccacagcaaataggattgagggctgcttctctgagctcaaggggatagaatggggaaccccatgagtactgcaacaaaactgtttgctggagacaagagctggtggctctgtgttgttctagtgacaggtggcctcatttcacagggaccccctcaccctatgtgccccatgtggctcagaaaagccagaaattgtctccactctcacaggggaaggtccctgaccccctctttgccagctgggccaaggcaaattggggtcacttcatggggtacaggacctaccctctcttggttgcccccaaggaggggatgtggaggggctggggacctggcaggaccagggtgtcttgagttaatttggggctgcctttagccgagggcttctgtgtgcctggcatcagctttacattgtgtcttgatccgtaaaacagccctgtgaggaaagatatttttaaccccatcttccagatgaggaaacggaggcccacagggtgacgtgacctgccaaggtcccctagccaagagtgacaaagccagggttcacacacagctctggacacaattcatcacccttcatccgtctctctctgactctttctttttccctctctctctttgtctctctttttttttttttttttttttgagacagcgtctcactctgtcacccaggctagagtgcagtggcgcaatctcggctcactacaacctccatctcctgggttcaagcgattcttgtgcctcaacctcccaagtagctgggattacaggtgcgtgccaccacacccagctaattttggggggttttgttttgttttgagatggagtcttgctctgtcgccaggctggagtacagtggcgtgatctcggctcactgcagcctctgactcccaggttcaagtgattcccctgcctcagcctcctgagtagctgggactacaggcatgcaccaacacgcccagctaattttttgtattttagtaaagacggggtttcaccatgttggccaggatggtctcgatctcctgagctcatgattcgcccgccttggcctcccaaagtgccgggattacaggcgtgagccactgtgcctgccaattttttgtatttttaacagagactgggtttcaacatgttggccgggctggtctcgagctcctgacctcaagtgatctgcctgccttggcctcccaaagtgctggtattacaggcatgagccaccatgcccagcctttgtctcttttattcttgtgttctctctctctcttccttctctttctccacctccttctccttctctcccttctcctcacccttctttgtgcttttctctgtgagtttctcttcttctctatttctctcctttggtgaatgtcaattagaaaagcagaaaaactgcgtttaatttgtgatcataaatgcatgtccctggccaggcgtggtggctcacgcctggaatcccagccctttgagaagctgaggcaggaagattgcttgagaccgggagttcaaaaccagcctggtcaaaaagcaagaccccatctttaaaaaagaaaaataattaattagctgggcatggtggtgtgtacctgtagtcccagctactcgggaggctgaggaaggaggattgcctgagcccaagggtttgaagctgcaccgagctgtgattacacccctgcactccagcctgggtgacagaaccagaccctgtctcaaaaaaaacctaataattaaaaataaataaataaataaatgcgtgtcccctggccagtggttgctaatgtttggaatcacctttgacccatgccctttttcattcatagatgtttgtcttgaccaaaatcaaagcattagactttggactataaatcactggttcattcaacaaccatcattgaatgcctactgtatgcagacactcttctggacacagaggagttgacgtgttggtggggaaagccagtgatcagttgggataaaaagggcagacagcagacattaaatagtttaggctttgtgggccagatggtctccatcgcaacgactcaatctgctcctgtagcgtgaaagtaacgacagataaagcgcgtaagtgaatgagcatggctgtgggccaattaaacgttaacctataaaaacaggtggctggcccgcgggctgtagtttgtggatcactgccttagagatagtgttagagggtggtgagaggtccgggatagaataaaacagtagagagtttgtgcattgtcaagatgagaggttgcagttcttcttatacaccccgaatggccgggcaccgtggccattatgatctataattctaacactttgggaggctgaggcaggaggatcccttgagccctagagtttaagaccagcctaggcacatagtgagaccccatctctacaaaaaaaaaaatttaaaaattagctggacatggtggagcatgcctgtaggcccagctacttgagaggctgagatgggaggactgcttgagcctgggaggttggggctgcagtgagccgatcatgccactgcactccagcccggatgacagagcaagaactgtctcaaaaaaaaaaaacaaaaaaacaaaaaaaacagacctgaaggaacaaatcatatgaatgcattaaagtatcacatgtatccaaaaaatatatacatctatcagcctggcacggtggctcatgcctgtaatcctagcacattgggaggccaaggcaggcagattgcctgagctcaggagtgcaagaccaccctaggctacatggtgaaaccccgtctctactaaaatacaaaaaattagctgggcatggtggcaggcgcctgtagtcccagctacttgggaggctgaggcacaagaattgcttgaacccaggagacagaggttacagttagccgagatcgtgccactgcactccagcctggacaacagagcaagactctgtctcaaaaaaaaaaaaaaaaaaaaaaaaaaaaaaatatatatatatatatatatatatatatatatatatatatatatatatataatcaattaaaaattttccttaataaataaacatttctctccttctctcccttggtgaatgtcaattaataaagcaacaaaactatgtttagttagtgatcattaatgtatgtccctggctgggtgtgatggctcacacttgtaatcccagcactttgggaggctgaggcaggagaggatagtttgaggccagcaattgcttgaggctttttgaaagacatgaaggagatgaagggagccatggagatatctcagggaacagcagccgaggtagatggaacagccagtgcaaaggtcctgaggcaggatgttcctggcatttgtgaggacatgtagctgcccagatgtccagtggggagtgagtgaggatgaaggaaggagctgatgaaggaagatgataaaatacttcatggatcagccaggcatggtggctcccgcctgtaatcccagcactttgggaggccaaggcgggtggatcacaaggtcaagagttccagaccagcctggccaacatggcgaaaccccgtctctactaaaaaatacaaaaaagttagccaggcgtggtcatgcacgcgtgtactctcagctacttgggagactgagactcgagaatcgcttgaacccaggagatggaggttgcagtgagttgagatcaccccactgcactccagcctaggtgacagagcgagactctgtctcaaaaaaaaaaaaaaaaaaaaaaagacttcgtgaacagacagcctatataatttatgatccaaaccaggacagttttgagagtgaaaggggaaaaagagcactgaaaaaataattagcaggcctggcatgatctataacgggtataaagtgggacacacagcctctctcacggtcactgtcagacttcagctttttcacactcaaatccacccccatgtttatcccatatactggagaaacgggtgttctcctgagctgagttttggggttttttccttttgttttgttttgtttttgtttttttaacatcctgtatactttttctcaatgaaccatgctcaaaaaaattagaggaaaataaaccataaaacagaaggcactgaaggattttgctgggactcagccattagtttgtttgatgagtatttatggagcgctttctaagcaccaggcaccaccagcgatactgggatgaatcagtaacatccctcacccttgaagctctcttgggcccattgttatttacttaaaatactatgcaagtacggagaaggggtgaagtgggaaaaaatcagttggttgtaaaggccagaatgacgggtctagtcccacccatgccatctgcaccctgtgtgatccaggcacatcatgttgcctctctcagcttcagtttctccatccaccaggcacagagatggcgggaatcgaggaagatgtggggagtatttcatcagcccaaaaagacttggctaatgcgaccataattctgccttctgcctctcctttcccagaaaaatagcttaatcatttggatttgggataaacacatttcctgtgtttattatttaaatgatccaccaagctgggcatggtggctcacccctgtaatcccaactctttgggaggctgaggagggcggattgcttgagcccaggagttcaagaccagcctggccaacatggcgaaaccccatctttactaaaaaaatacaaaaaaattagctgagcgtggtggtgcgtgcctgtaatcccagctacttgggaggccgaggcacaagaatcacttgaacctgggaggcagaggttgcagtgagcctagatcgtgccatcacactccagtctgggcgacagagtgagattctgtccctaaataaataaataaataaataaataaataaataaaataaatgatccaccaacaggaaccccaggaacatttgtattgactatgcaactaatgcttagtgagcacctactatgtccctggtgctgatctggacactgggatttagacaggaaaaatctctaccctggaggagctgatgatcaagatgacaatcttgaaatgcataagttgacaagatgattcagacagtggaacgtgctgggaagagaatgagatgtctggctgagctgcaggaaggggcaagtccttttgattgagaggtccaagaaggcttctctgatgggggcacaatggatctaaggttgagtgataagaagaaattggccaagccaagacctaaaggcagagttgctccaggcataggttcagagaatggaaataattggctgattgtgatcttgaacttgacctttcttttcttctgctaactttgggtttggtttgttcttgcttttctggctccttgaggtacgtgttgggttcttaatttgtaattttttttttttttttttgcttttttgagacagagtctcactgtggtgcccaggctggagtacagcagcatgatcttgactcactgcaacctctgcctcctaggctcaagtgaacctcccacttcagcatccccagtagctgggactactggtgcacagcaccacacccagctaatttttttatttttattttttagagatggggtctcactgtgttgcccaggctggtctcaaacccctagctcaagcgatcctcctgccttagccccccaaagtgctgggatgagaggcgtgagccaccacatctggcctctgttttttgtgatgtaggtatttgatgctataaacttccctcttagttgcttcttggccctttagctaaggtcaagtgtaaacttccctcagcactgcttctgctgcatctcacaggtgttggtgtgttgtgtctctattttcattcatttccaaaattttttaagtctccatcttaatttctgcattgacccaatggttgttcaggagcatgttgcgtaatatccatatatttgcatcatttctgaaattcttcttggtattgatttctagttttatcccacggtagtctgagaagatgcttgacagaattccagtattttaaaatttgttgagagttgttttgtggcctaacatgtggtctgtcttggagaatgtccatgtgctgatgagaagaatgtatgttctccatcagacatgcaagagacagacactttctcacctgcctcatgggatccataaaagagtcaatcagaagttggcatttaagaaagaccagaaggaggctgggtgcagtggctcatgcctgtaatcccagcactttgggaggctgaagtgggtggatcacctgaggtcaggagttcaagaccagcctgaccaacaaggtgaaatcttgtctctattttaaaaaatacaaaaattagctaggtgtggtggcgggcacctgtaatcccagctactctggaggctgaggcagagaatcacttggacccaggaggtggaggttgcagtgagctgagatcacaccattgcactccagcctgggcaacagagcaagaccccatctcaaaaaaaaaaagaaagaaaaaaaagaaagaaagaccagaaagaggtgaaggagcaagctacagagatatcaaactgtatcaatctggctgggcgtggtggctcatgcctgaaatcccagcactttgggaggctgaagcaggaggatcacttgagcccaggagttcgagaccagcctgggcaacagagaccccctctctacaaaatataaaaatttaattaaaaagatgtattggtcagggcagccaagttatgctgcagtaacaaacatccccaaagcctccatgacttttgacaacagatgtatttcctgctcatgctacatgtccagtgcaggttggcagtggggaagaagggggctctgttcagtgcagtcacttgagacctagctaatcacctagaacattgccacttgctattccagaaggaaaaaaggaatgctagaaggtcccacactgaaagttcaatgctctggctccaaaatgacagctatttccactcactcctcattggccagcacttagcatgtggtcctcagccaaccccaaagggactcaggaaggaccatcccaccatattgctggaaatatttgatggcagcattaatggggaacagtgttccaggcagtggaagtctttgagcccttggaagaaagacaaggcgatctctagagcacatccttcccaatattaatgaatttaacaaatgagcaagccatcctcccccactctccttcccgaattcagacttgtgcatatccctcccttaacttgaactgccaaagaagagatgagaaccaggagaagagatctgtgaccccatctttgctgatgaactaccacagaacagccatggcatctccagtccttgtgcttgtaaaatgtacttttcattttgctcctgaacgaaatccacccacccccacccccaaaccagggaaagctcatctcctaatccaaaactgcacccagccttccaccaccttcttccctgggaattgttgattccagagtatggaattgaataattggatgagtttggaagagaaaaagtgtctctaaaatcaggcagcagaagcccactccccagagaggatggtgcagatgagagttcaggagggagcttggcttggggttgacgatctgagctatgcagggaacttggacacacctctcaatcagtcattcaacagacaccacttattgagcaccgactgtgtgccagatgttgtcctagggggctgggaatacaggaatacagcagggaacaaaaaggacaaagcccctccctcttgtcgaatggacattccagccaggaagacgagagaacaagagaaataagtaaagtatataggcggtgaaatgcaaatgggaaaaaagaaacaatggggaccagaaatgaggggtgcaattgtaaagggccatcaggggaggcctccctcagaaggtggcatttgagtaaaaaacctgaaggaggtgaggggaaaccatgtagcaatctcaggaaagagcattccaggcagggagggacagcctgtgcaagggccgaggtaggactgtgcttggcgtggttgagaaactgcaaggaagccaggtggctggaaccgaatgagcgagggaaaaggggaggagataaaagcaaggagatgggagggttggaggccccctctgccattcagtaactgagtaacttcatttatttcctgtagcttgaaccacaaagaaccacaaatagagtagctgaaaacaacagaaatttatttattctctcgcagttcaggaggccaggagtccacagaccatcaaggtcagctgggccacagaccatcaagatgtcagctgggccatggtgcctcctgagacttggtctgaaatcccttcttgcctccctcctagcttctggtggtttgccaacagtgcttggtggtccttgtcttgtagacgtatcaccctgatcccgccttcatctccatttcacatggccttctccctctgtgcaaggttgtctctgtgcccaggtttctccttttcttattatttacttatttgtttgtttgtttctttattttagacacagggtcttgctctgtctcccaggctggagtgcagtggtgcgatcatagctcactacagcctcaaactcctggcctcaagcaatcctcctacctcagcctcctgagtagctgggactgcagatgtgagccactgtgctctgcccagatgtcctctttttataaggaaacccgtcatttaggatgaggttccaccctaatgacctgatcttaacttgattccatctgcaaagaccctatttccaattcataggtaccagggattaggacttcttcaatgcatctttttggagagacccactgcaacccacaacagaactgtgggcatgtaacttgacctctcggccaggcgtgatggctcacacctgtaatcccagcactttgggaggccgaggtgagtggatcgcctgaggtcgggagttcgagaccagcctggccaacatggtcaaaccccgcctctactaaaaatagaaaaattagctgggcatggtagcaagcacctgtaatcccaactacttgggagggtgaggcaggagaattgcttgaacccaggatgtagaggttgcagtgagccaagatagtgccattgcactccagcctgggtgacagagtgagactccatctcaaaaaaaaaaaaaaaaaaaatagacctctctgtgcctcagctttctcacccgggaggatggggataattatatacccactcctggggttcatgagaggattaaatgagctcaaacagtccaagcctccacgtgtgtctgttgtggtgctgggtagcatgtcctgtggccagaggttcccaagcttgtcgaggacccaggcaagggcagattcgggtcttgttggcagcacctgagatggacgggctgccttggtatggaagggcctcggctgtttttccctttcagtcctgtccctctcccccatcctccaccctgtccctgtcatctgagcctgctcctcgtgatggctcagagtctccctactggcggccggtgcagagtttcgttccctgggctatatttagccctgagaaatgggaacgagaaccctcagccgccaaagtgatggagagaggagcacaaagccagtgctgccttctgtccagcaatgttccgctgactcggttctttcttccagaaccttccagaagcaaagcattggcatttctgagctcgttaaaacaaggatgtgggctggtggctggcacattcattgtccccagaacctgtctgtgtccatgattaaagctgactttgttagttttattttcagtgcttttttttttttttaatccatggcaaaacacacatgacataaaatttaccatcctaatattttttttaactttgtaacattttttaattgacaagtaattgtacttattcatggggtacatagtgacgtttcaatgcatataatgcgtagtgctcagatcagggtaattagcatatccatcttctcagacctttattgtttctttctgttaggaacattcaagctcctccttctagctatttgaaaccattaatatattgttgtcatcctaaccatttttaaggatacagtttcgtgaaattaagtataatacattcacattgttgtgcaactgtcaccaccatccatctcccaaacttttccatcttccaaatgtaactctgtccccactaaacgcgaactccctgttccccctcccccagcccttggcacccaccatgctactttctgtttttataaatctgacgactctagggacctcctataaatggaatcatacaggattttcccttttatgactggtttatttcacatagcataatgccctcaaggttcacccatgttgcagcacgtatcagcattttctttctttttaaggtaaagttgactattaaaaaaaaacttctgccgggctcagtggctcacgcctgtaattacagcactttgggaggccaaggcaggcagatcaggaggtgaggagttcaagaccagcctgaccaacatggtgaaaccccatctctactaaaaatacaaaaattagccaggcatggtggcgggcgcctgtaatcccaactactcaggaggctgaggcaagagaattgcttgaacccgggaggcagaggttgcagtgagctgagatcatgccactgcactccagcctcggcaacagagtaagactccgtctcaaaaaaaaacaactttttaagaattgaagtagaataaacatacagaaaaatccgcggattataagtgaagagcttgattaattgtcacaaactaaacacatccatgtaaccagcacacaaatgaggaaacagaaacttctcagccccagaagcccccctcatatcctgttcctagtcactacctccccgcaagggtacccctaccaggactttgagcatcattcaccagtttagcctgttttgtattttgcataaatgaagtctggcttcttttgcttgacgttaactttttaagatctcatgtgacctgtggcattgttcattgcatgtatcctctctctcctattgataacagtgtggattgtttgcaatttggagctatgatgaataccattgctatgaatgttcttgtgtgtgctttctgttgtgtaattattcagaattactatttcggaattactatctaattgtagtgatcttggatcagtaactatccaagaattactgggtgttggcaaaggtacatacagttatacactgcacaatggcattttggtcaacaacagatcaaatatgtaacagtggtcccataatggaccgaatacataacagtgattatcatacagtatttttactatagcttttctgtttttagattcttttttttttgagacgaagtctcgctctgttgcccaggctggagtgcagtggtgtgatctccgctcactgcaagctccgccttctgggttcacgccattctcctgcctcagcctcccaggtagctacaggcgcccgtcaccaggcccggctaattttttttgtatttttagtagagacggggtttcaccatgttagccaggatggcctcgatctcctgacctcatgatctgcccgcctcggcctcccaaagtgctgggattgcaggcgtgagccaccgcacccggcctgtttttagatatttttagatacactatagagttacaattgcctacagtattccatagaataacatgctgtatgggtttgtagcctaggagcaataggcgagaccatgcagcctaggtgtgtagtaggctataccatctaggtttgtgtaagtacactccatgatgtttgcacaacaaaatgacctagtgacacatttttcagaatgtatgcccattgttaagcatgacttaattttagcatagaaactctcaaccaatttttcaagtagttgtaccatgtgttatgggttttattgtctcaccccaaaattcatatgttgaagtcctaacccccagtacctcagaatgtgaccttatttggaaatagattcattgcacatgtaaaggttttgccattggcaaaactgccgttatttttgcaccaaccatagcagttaagatgagatcattagggtgggtcctaatctaatacgatggtgtccatataaaaaggggagattttggcacagagacaggcacactcacaggaagaatgccatgtttaaacaaaggcagagctcaggatgatgcctctacaagccaagaatcagcaaagattgccagcaaaccgccagaagctaggagagaggcataaaacagattctgtctcacagctctcagaaggaaccagcccttctgacaccttgagcttggatttttggcctctataactgtaagacaataaatctttgttgtttaagccacctaggttgtggttccttgttacagcagccacaggagatgaatacagcatggtgccctcccattggcagattatgagggttccagttgctccacagcttcacagacacctggtagtaatgacctcatcttaacttctttctcattttagcctttcttccaggcagcagcagtgtcatacatgcttttaaaggtgggcttttaaagccacacttgagagccctgcattctgcaggtgtcacagggtgatcaactattcaaaggctacccctgccctgacagctggaggcaaggcttcccagcacagaggttaagcccatggactctggggccaggtggttagtgcaaatcccatgtccactagtgaataactctgtgatcttgggctgatgattttgtctttctaagcctcagtttcctcaatagtaacatgggcattataacatagaggcatcatgaggattaaatgactaagtgagctaacatacataatgtgcttaggaaggtgccagcacaccataaatactctgtaagtgctggcttttatcattcttttctctctctctctctctctctctctctctctctctctctctctctccctctctctctctgtctctctttctctctccaccccccaacctcctctccttgattttcttcccctcatcttacttccttcttgctatagtgttctattttctgtttcagagagtattctatttgtggacttttttcctcttgaaaattgagctgaaacttctgagaattttttgtgattggcattaaggctgcagggaatggagcagggagacacttgaggaaagggctcatggaccatctgtctggcttggtgatttcaccaggccatcagactctgtggtcatgcatctcctctaaggggagtctatgactgtgttgggagaagagaaggaaccagggattaattaatccatttcaataggttttgtgttttgtttggtttactttttccttctccttctggactgtggtctgggaagtcctcttgtgtttcttactccattcccaggtcaattatgttatgtgaggagaacataattaagagagagctttaccctttggatgttttcttcagaaaacgttcctccatttccccctctgggatgccagagccccagaactccacaagccaagaacatttaagacagagccacaagagaaccgagcttccccttccctcacctgtcaggttctatctgagtcccagtcaactctcacctgctttccctcctcacaccctacagagcaacgatgcctcagggaacacttggaactggttgtacttcatccccctcatcatcatcggctccttttttatgctgaaccttgtgctgggtgtgctgtcagggtaagtttctgctactccccaccccatcccactcactcctctttgctaacttctttccaagtagaggccattgaagctttgttttcattcactagacagagaaaaggcttcttcccttgtttgggttaccagactgttattagcaagccatgcacaggtgcagaggttgtgtactgctaggggtacccagtgagagggttcatatgggctttactttctttacattttttttaaaaaccaatagtttgggtttacttctcccccattttccaaatataaaatcatagcatatgctctaacggtgtattttcctgacccatattgtcctctatccccaagatttttttggcttaatcataaatgggcttcatttttcttaccataagaagtctgggcacttgtatggtggctctatggcaccatcagcaaccccagattcttccagctttccattctgacatctttaccagaggcttccaatctcgtggatacctcatggtcttaagatggctgcctcacgccctccggatggccacttcatgttccaaacaggaaaaggaagaagggaaacaggaagaggtgggacctatggcagagaagccaacctgctgcagaaatctttcattcatggcttattggtctaacttaaaagagggctgaaataattattagccaaaagtatgaagagaatgagaatgaggtatgcagccagtggtggttggcatggcatggttttatcctttcggtttttttcttttttattgtttttttttgagacggtgtctagctttattacccagactggagtgtagggggcgatcatagctcactgtaacctagaactcctaggcacaagcgatcctcctgcctcagcctcctgagtagctaaggcaacaagtgtatgccaccatgcccagctacattttttatttttcatagagatggggcccactgtgttgtccaggctggtctcaaattcctggccttaaatgatactcccatctcagcctcacaaagtgctgggattacagacatgagccactgtgcctggcctttttctttacctaggcacagttgtcgggaaatgtgtgaagctggcagaagcacccatcactataatatcccagtcttttcccagaagtcctgactcctcctgttgaaaactcctgacctccagggacttctgaatccccaaacacacacacacacacaaacacacacacacacacacacacacacacacaaacacacacacaaacgtttcctaacattttcaaaacagccatactctggcttttctatgcttctccagggagtttgccaaagaaagggaacgggtggagaaccggcgggcttttctgaagctgaggcggcaacaacagattgaacgtgagctcaatgggtacatggagtggatctcaaaagcaggtgaggccctttcatcctggggcccagggatggagatcccaggccacggagtacaaagagagtcatgcagtttggagaaggctaagctgggagggttatgatgggaggagaaagagaacctgaattggtagtcccaaattttatcaacaagaatccagagtctgatatgaagaagtctaagatgaagccaggatctgacatcacgtaacttgaattctgaaatcagacgctggtttacatcccggccctgccactttttacccatgcaccacacatccctgtacctccgtttcctcagctgttacatggaggcgatggtagtgcctaagtcatagtactattggagtatttagtaaaataatctcagctgagtcacttggggagagaagtgcctgatacacggtaggcacatatttatttgttcagccatttaacaaacatttagggagcacctgctgtgtgccaggcactgatctaagcactgaggatatgggagtaaacaatacacaccaaatccctgccctcagagctctgatattctaatgagagagataaagcaaacaaatacatgtcatgttgggaactcccaaattcagagaaggaagataaaacagactaggaagataaaacagagtaggaagttggccgggcgcggtggctcacgcctgtaatcccagcactttgggaggctaaggcgggcagatttcctgaggtcaggcattcgagaccagcctggccaacatggtgaaaccctgtctctactaaaaatacaaaaattagccaggcatggtggcgcacgcctgtaatcccagctactcgggaggctgaggcaggagaattgcttgaacccaggaggcagaggttacagtgagctgaggtcgcaccactgcactccagcctgggcaacagagtgagactctgtgtcagagaaaaaaaaaagagtaggaagttagaggcagggtggtcagggaaggcttctctaaggaagtaccctctgagcagagagacctgaaggacgtgaagaaggaagctgtggggatgtcaagggaaggggcattccaggcagagacagcaagtgcaaaggccctgagctaggaacgtatttgagacacagcaaggaagccagtgcagctgaaacagagtgagaggtggggacagctggaggagaggaagacaggaaggtgatggagatcagatcaagcaggggcttataggctgtggtgtggacattggtttttattttgcgcgaggtggggagaatgttggctattgctactgttgcggaggtggggcttgaagtcacaaaccacccagcagcatgttttttggtcggttgagctgtcaccatcagtcagcagagaatgggggtggccgggcagacccttcttcctggtccaagggagaactcatcctccaaatgcaggagcttaactctgtgctcttcctcttcagaagaggtgatcctcgccgaggatgaaactgacggggagcagaggcatccctttgatggtaactgctctaaacccacctcaggggtgggtcccaggggagaagggagaagctgtggtggggagtcgggggagagcaggtgactggttctaaggatcttgcagagggtagacgttcctcttggaggaattttaggacttccatgcagagtttccctattctggcctccacttttttgttttaaccatggacctggttttttctgctttgtgccttggtttttctcatctgcaaaatgggtatgatataaacaataccctagctcacgagattgtttctcagaatgatattcgttatggcaaatagaacacctgggatagtgcctggcatggggtcagcacgtttctgtttgctaaataagtaataattccaccaataatccagtttactgtgaacggctgctgtctcccatgttagaaacttaacgagacagaaccatgactttctttcttttcttttttttttaattgagacagagtctcgctctgtcacccaggctggagtgcagtcacacgatctcacctcactgcaacctctggctcccaggttcaagcaattctctgcctcagcctcatgagaagctgagattacaagcatgagccaccatgcctggctaatttttatattgttgatagagatggggtttcgccatgttggccgggctggtcttgaactccttgcctcaaatgatctgcacaccttggcctcccaaaatgctgggagtgtagatgtcaattcatggtcccctggaaacctgaatatgaaaggagggaccattaaaaaggtgtccaaaagcccaacctccccagcatagctgggagtcaggggacagactgtaagagtcactgtgtatccaacctgaggcttcatgaaagtaaagtttcctagaatttagagatagggttggatgcggtctgtctgtggctcacatctgtaatcccaacactttgggaggccaagacaggaggaacacttgagcctgggagttcaagaccagcctgggcaacataatgaggttccgtctctacaaaaaataaacttagccagatgtgggggcacacgcacctatggtcccagctactcaggaggctgaggtgggaggatcacttgagcccaagaggtcgaggttgcagtgggcaccactccactccagcctgggtgacagagtgagaccctgtttcaaaagaaaaaaaaagaatttagagataggccagaataatatgtctgcaatataataataacagcaataagaaaaataatagtactccctgaaaaatgcaacttcttgcttgagatttatcttctcatactttagaaaactggttagacaggggctgggcgtggtggctcatgcctgtaatcccagcactttgggaggccaaggcgggtggatcacttgaggccaggagttcaagaccggcctggccatcatggcgaaaccccatctctactaaaaatacaaaaattagctaggtgtcatggcacacgcctgtaatcccagctactcaggaggctaaactacgagaattgcttgaacctgggagacggaagttgcggtgagccgagatcacaccactgcactccagcctaggcgacagagcaagactctgtctcaaaaaaaagaaagaaagctggttagacagggtgatgacttttgattaaaaatctgagagatttgagggaaataaaagaactggcactgcgtcccagaaggttataaaatgaattttattatcttagttggggaggggagattacctaactcccctaaatgagttaggtaatctaactcatttagggtacctaaatctttttattggaagtctacacctgaacttgtctgctgtggagcccctggggtgtatagcttgaatatgggggcagaatcccaaaattgcagcctgcctagcgagtatgctacaggtcaaggggtggactgttttcataagaaagtgaggtttcttagaatttaaaaatagaggctgagtggggcggctcacgcctgtaatcctagcacttttggaggccaaggcaggcaaatcacttgaggtcaagagtttgaccagcctggccaacatggcaaaaccccatctctactaataatacaaaaattagccaggcgtggtggtgcatgcctgtagtctcagctactcaggaggctgagggaggagaatcgcttgaactcaggaggcagaggttgcagtaagccaagatcacaccactctctgggtgacagagcaagattctgtctcaaaataaataaacaaataaataaataaaccagaaggaaaatagtggctgagggcccagacctggagtcggactgaacccgacttgattcttgtctttacccctttaagcaaagtgatagtgccaccttgaacctcagtttacacatctgaaaaatgggtatactattagttcccgtgagaacagttgccgtgagagttaaatccaaggacacactgtgtccatatggtctgtgttgcaaaaagggtaacgtctttttctcttgccatgtttccattgttggagctctgcggagaaccaccataaagaaaagcaagacagatttgctcaaccccgaagaggctgaggatcagctggctgatatagcctctgtgggtgagtcccttcctctgccacctatcagttgttcatcacctatcgcccaagagacatggtggggtgggggcagagggcttgcaaaccgtgctgcctggatttgggtctcagctccaccctttcccacctgtgcgtgtgtcctgggcagattacatcattatgggaataacatccgtgcctagcttctcattattttgtgggaattcaactaaatgatccccatgaagcatggcaaaccagcacctggcagggacgaagctcccagtcaagttggtgaatgtttgtgactcattcgggaagtattcatgggggacctgcttatattaggtgcttggttgcaaacaagacaaggcagtcacgaggctgagctgggaggatcacttgagcctgggaagtggaggctgcaataagccattattgtgttactgcactccagcctgggcacagaaaaaaaaaaaaagacacaaactgagccaggcacagtggctcacgcctgtaatcccaacactttgggaagctgagatgagcggatcacctgatgtcgggagttcgagaccagcctggccaacatggtgaaaccctggctctactaaaaatacgaaaaaaattagcctgtagttccagctactctggaggctgaggcgggagcatcacttgaacctgggaagcagaggttgcagtgagctgagatctcatcactgccctccagcctgggcaacagagcaagatcctgtctcaaaaaaaaaaaaaaaaaaaagacacaaaccaaatccctacctacatggagctcacagtccagtgcaggaaatagaaattaaacagagaattacacaaataaacctgtaatggtaatggcacttcagggagaggctctgggcttagcttgctctagaaggatggggagcagtcagggaaggctacctggaggaagtgacggttaagctgggaactgaaggatgggtaggagatcactgtggtggtgatagcagaaggaacagtgtgagaggcagggctcagacctttgccaccacaagggccagagttcgagggaggagggaacatttattctttcccttctcactcctctgtcctattgattcattggctgtgatgatgttgattttgaccttctaaagtgagaatgtattgttattgttgttgttgttctttaatgggtttttgtttttaatggaaggaagagcatccaggcagaggaaataagactggaataagattgaggggagaaggaatttaggctgcttgggaaactgtgtggccgcagtttagaggaagaaaggatggcaagagaaagaggaagggaggaagagaaggagggagagaagtgaaggaaggagggaagttagtacatccatgtgtttctgatccatagtttctgatccactatttcgtattccccttttatcgctcgcccctagtttataaccttattgctgagtttaggcataatttccattgcgatcacatatctcgtagggtggatacactatggtttgtttagccatagctctattatagggtgtttgagttgtttccaataatttctcttacgaagaacactgctgtgcacatttacgtacaatgactccccccaccctttgggcgtatttccttggggataattataggatcaaagatattaacagcttttcaactcattattcaaagagccattctgagtttcaaaaacatggaacccatttataaacctgccaagtatgcatatgttcatggattccccacccaggccatcgaatattaccaatttaatttcctttcccagttaagtgggtttgtaatgaaaccttaaagcttgttttcatttgcatttttaatttccagccaaaacacgcttttctttgtaatggagaactcattctgcttccactcgtgtgtgcatctgtttaatttcctgtaagcaaatgtcaagaattggagcgctcagtaggtgtcttgagtatttgatcaattatgtctgtctcacgtgttacgttacctccattgtttaaaatctgttttatgacgaggtacagtggttcacgcctgtaatcccactgctttgggaggccagtgcaggaggatctcctaagatcagccgttcaagaccagcctgggcaacataacaaggctccatctctgaaaaacaaaatgttgaaaaacttagccaggcattatggcacacacctatagtcccatctatttaggaagctaaggcaggaggatttcttgaacccaggaattcaaggttgcagtgagctatgattgtgccactgcactgcaacgtgggcaacagagtgagaacctgtctcttaaaaaaataaaataacatacattcttaaaaatctactttgctggccgggcgcggtggctcacgcctgtaatcccagcactttgggaggctgaggcgggtagatcgcttaaggtcaggagtaggagaccagcctggccaacatggtgaaaccgtgtctgtactaaaaattcaacaattagctgggtgtggtggcgtgagcctgtaatcccagctactcaggaggctgaggcacaaaatcacttgaacccgggaggcggaggctgcagtgagctgagatggcgccattgccctccagcctgggcatcaagagtgaaactccatcaaaaaaataaaaaatctgcatatacatatatatgtatatatatttttaatttttttaatttttttttttttttctgagatggagtcttgctctagcacccaggctggagagcaatggtgccatctcggctcactgcagcctccgcctctgttaacaaggcaggtgacattgcagctttctaaacagacccaaaacccaggccagtggcttgttctttcatagccacgtttgctacaggcaaatccaccaaaacccacctcatcagcctgattactcaaaaagacaaagaaaggagcccccaatctagccagtggttttctagaccaccccaaaagagatctctggaattccaggattctggcaaggaatcacatttagctttatttatttatgtaaagaatgcaacaatacaggctgggtgtggtggctcacgcctgtaatcccaacattttgggaagctgaggtgggaggatcgtttgaggtcaggagtttcagaccagcctaggcaacatagtgagaccctgtctctatcaaatattagctgggcattgtggcacacgccagtagtcccagctactcgtgaggctgaggtggatcacctgagcccaggaggtcaaggctgcggtgagccacagcatgcccctgcactccagcctgcgtgacagagacttcatctcaaaaaaaaaaacaaaaaaaagtaataatacagtaatgcatatttcaaagtaaggtgggagctatgtggtatttgcgttcacgttcacattataccacagtatgcacagtccttttttttttttttttgagacagtgtcttgctctgatgttcaggctggagtgcagtggtgcaggcatagctcactgcagcctcaaacccctggactcaagtgatcctcccacctcagcctcccaagtagctgggactataggtgtacactgctacactcagctaagttttttatattttttactagagatgggatctcaatatgttgcctaggctggtctcaaactcctggcctcaaacaatcctcctacctccacctcccaaagcagtgggattacaggcgtgagccaccacacctggcccacatgcagtcttatataattggtgattctactgcgctgttgaatcagttgataaacgcactataaagcaggttcattcctaattgatgaacttactgctgaaataaggaacttgaatcatttacatgaaaagttgagccatgttgctgaaaggatatcaatttttttttcttttttttctttttttttgagatggagtcttactctgtcgcccaggtgggagtgcagtggtgcgatctcggctcactgcaacctccaccttccaggttcaagcgattctcccacctcagcctccaagtagctgggactacaggtgcacaccaccacgccctgccaatttttgtactgttagtagagatggggtttcaccatgttggccaggctggtctcaaactcctgacctcaagtgatctgcccacctcagcctccgaaagtgctgggattacaggtgttagccaccgcgcctgacaggatatcaaatttcatttagactgcaggaatacgttcaagagatctattttgtacagcctggcgactgtattaataacaatgtattatatacttgaaaattgctcagagagtaggttttaagcattctcaccgtgagaaaagtgataagcatatgtaataatgcatatgttaactagctcaactgagccactccatagtgtatacatatggtcaaaatatcatgttatgcactataaatagatacagcctgtatctgtcaatttaaaataaatgaataataactttaaaaagaaaaataacagtatggctgggcacggtggctcacacctgtaatcccagcactttgggatgccaagacaggcttgaggccaggagtttgagaccagcctggccaacatggcgaaactttgtctctaataaatatacaaaaatcggctgggcatggaggcgggcgcctgtaatcccaactacttgggaggcagaggcatcacttaacctgggagatggaggttgcagtgagccaagatctgcactccagcctgggtgatagagtgagcctttatttatttctgtaaagaatgcaataatacaggcctggtgcggtggctcatgcctataatcccaatgttttggaaggccaaggtgagaggatcatttgaggctacaggcgcatgccacagtgcccagctaatacttgatagagacacggtctcgctatgttgcccaggctggtctcaaaaccctggcttcaaatgagcctcccaccttggcctcccagagtgttgtgattacaggtgtgagacactgtacctggcctgtattaaaaaaaaaaaaaagaagaagaagaagaagaggaggaaagaagaagaaggaagaaggaagaagaagaagaggaggaggaggaggaatgggaaggggaaggggaagaagaagaggaggaaggggaaggggaagaagaagaggaggaggaaggggaaggggaagaggaagaagaagaggaagaagaagacgaagaagaagcacaatgataaataagtaaaatgtggagcatatgaaaacaaaacaaaaaaaagttgatccattatgaatggaagctgccattgtaactctgcttttttaggaaaaccagaccccatttagatgattttatttgtttttaaaggcaggttcttgctctgtcactcaggctggagtgcagtgatatgatcatagctctctgcagcctggagctcctgggctcaggcgatcctcccagcttagcctcccaagtagctgggactacaggcaccaccacacccagctaatttgttgttgttgttgatgttgttgttgagatggggtctggctatgttgcccaggctggtctcaaactcctggcctcaagtgatcctcctgccctggcttcccaaagttctgggattacaggcatgattttttattaatttatttgcagctgacaaatggtaattgtgtatgtttatggagtgcagtgtgatgttttaatctatgtatacatcatagaatgattcagtcatgctaattaacacatccatcgcctcaccacctcaccgttttttgtgtgtggggaaggcattaaaaatctcttagcaattttgaaatatgcaacacattactatttattaataatgcaatataaatacacaataatgtattaatgcatcactaaatgcgatgcaatgcaatgcaatgcaatagatcactaaaacttactcctccagtctaactgcaacttataccctttgatcaacatcttctccttctcaatccctcctcctcccctgcagcctccaggaaccaccttcctgctctttctatgagatcaattttttttagttttaagctcccacatgtgagatcatactgtaattgtctttctgtgccagcttattttactcagtataatgtcctccagttctgtccctgttgtcacacattacagaatttctttcttttagggctgtatagtattctatttgtatacataccacattttctttatccattcatccattgtgggacacttagtttgcttccatattttggctattgtgaataatgctgaagtgaacgtgggagtgcagatgttctgaaaagacttaaatgtcagacctgaaatggtaaagatgctccaagaaaacataaggagaaagctccatggcattggtctcgggaatgattttttggacaggacctcaaaagcacaggcaacagaagccaaaatggacaaatgggatcgtatcaaactaaaaaatttgtgcacagcaaaggaagcgttcagcagaggaaagagacaacctaaggaatgtgagaaaacgtttgcaaacaatacatctgataaggagctaatatccaaaatatataaggaactcaaacaactcaacagcaagaaaacaacccaattaaaaatgggcaaagacagctactcgggaggctaagatgtgacgatcccttgagcccgggaggaggaggttgcagtgagctgacattgcatcactgcactccaccctgggcgacagaaggagaccgagaccctgtctcaaaataaaaaataaaaatgtgcaaaggatctgaacatacatatcccaaaagaaaagacatacaagtggccaacaggtatatgaataaaatgctgaacatcactcatcatcagggaaatgcaaatcaaaaccaccattagctatcacctcacacctgttagagtagctattatctttttgtttgtttgtttgttttttgttttttgttttgtttttgagagggagtctcactctgtcacccaagctggagcgcagtgttgtgatctcagctcactgcaacctctgcctcctgggttcaagggattctcctgcctcagcctcccgagtaactgaaattacaggcacacgccaccatgcccagctaacttttgtatttagtttcactatgttggtcaggctggtcttgaattcctgacctcaaatgatctgccctccttggcctcccaaagtgctgggattacaggtgtgagacactgtgcccagcctagagtagctattatcaaaaagacaaatgaggtttgttgaagttctaacccctggtacctgcaaatgtggccttacatgaaaatagggtctttgcaggtggtaatcaagttaagatgagatcaaacttaattagggtgggtcctaaatccaatgactgctgtctttataagaggagaagcaggctgaccaacatggtgaaaccccatctctactaaaaatacaaaaattagctgggtgcagtagtgcacacctgtagtcccagctactcaggaggctgaggcaggagaattgcttaaacccaggaggtggaggttgcagtgagcagacgtcatgccactgcactccagcctgggtgacagagtgagactccatcttacaagaaaaaaaaaaaagacaaatcataacaagtgctggcaaggatgtggggaaacggggatccatttacatcattttaataacacaggctctatatgggtggtattgagttcccagagttgccattacaaaatgtcacaaacccagtggcttaaaacaacagaaatttcttctctcacagttctagaggccagaagtccaaactgaaatcaaggtgtcagcagagccaccacgttccctcagaaggttttaggggagaatctgttccatggtattttcttagtttctggtgctgccagcgatacttggtgttcctcagttcatagatgcataattccagtctctgcctctgttgtcatatggtcttctttctgtgtttctgtatgcgatttcttttttttttttttttttctgagacaagtctcactccatcacccaggctggagtgcaatggcacgatcacagctcactacaaccccaacctcacaggctcatgccgtcctcccacctcagcctcccgagtagctgggattacaggcgtgtgccaccatgcccggctaatttttgtatttttagtagatacggggtttcaccatgttggccaggctggtctcgaactcctgaccttacgatctgcccatctcggcctcccaaagtgttgggattacgggcacgagcccaccgcacctggccctaattactttatttttttgtaaatttttttttgtaaatttcatgtagcctgagcatacagtgtttataatatatacaggagtgtacaataatatcctaggccttcacattcactcaccactcaactcactccctcaccaagagcaacttccagtcctgcaagctccattcatgccaagtaccctatgcagctgaaccaccttttctcttttatactgtgtttttactgtaccttttctatgtttagatatgttcagacacacaaatactatgatgttacagttgcctacagtattaagtacagtaacatgctgggcaggtttgtagccgaggagctacaaaccacgtagcctgggtgtggagtaggctacaacatctaggtttatgtaagttcactttaagatgctcacacaaggacaaaattgcctaacaatgcatttctcagaacacgtctccctcattaagccacacatggctgtattacaatttacatataattttaagcgtatataaattgccagaaatcaccagatgaatccttggcggtgacataccccttcccccaccatagaacattgcagactggcccggacgcccagtatctcatgcctgtaatgccagcactttgggaggctgcagcgggcagatcacttgaggttaggagttcgagaccagcctgaccaacatggcaaaacaccatctttactaaaaatacaaaaattattcggacgtggtagtgggcacctgtagttccagctacttgggaggctgaggcaggagagtcacttgaacttgggaggcagaggttgcaatgagccaagatcgtgccactgcactccagcccgggtgacagaatgagactctatctcaaaaaaaaaagaaaaaaaaaaaaaaaggaaaagaacatttcagactggtaccagttacaccggctcttgatcccttgaatgtggctgaccctgaactaggatgtacttcataataacacgtccggctgggaatacttagtacaaaagaaagagtataaaatatcttttgaatccaccttgatattgattccatgttgaaatggtaatattttggatgtattgggttgaataaaacatctcatgaaagtgatttttaaaaatctagaaattgtctgcaattataattccagaccacagagaaaaacgagagacaggaatgtatagaaaaagggaacgtgggacaaagtgagtatgaaattcaactaacagaagtgacagtgcctagcatggggtccagcacttagtaggtgttcaattaatattcatttccctctcccttaccagtgaagggtatgcctgtcgtggggaatgtgtcttcaggctgagtgatcaggaaggactttctcaatggctggcacgtgaacctagtcatgatttcagctcttgaggttgtactagaagatttatatccaataatcgtaaggtaccacttagcatcacgctaagatgtattaattcatttatgcctttggatggccctttgaggtaggaagtgtggttgtctccagtttaccaaggtggcttgcccaaggtcatctgctggttggtgattaagccaggttttcagtgtggctccagcaggagtgggggctggggaccttctacctgctgtggtttctctctctctctctctctctctctctctctctctctcgatctgtggaacatcccccctgtcccccaaggtcccaagggtcttatttcttttggccaagccctttggagacctgcagatctggacacatctttgagagtttcaggaactagggccagaaatgctgggcagggtcatgaggagctgccactggggttgagaaggtgatggacatgaggggaagggtctttgcagaaaggagaggcgtccctgtaagcaggtcacagccactgggcctggccaactgcagccgagtggaatgtgcccctgccccatgaccatatgccccaggtgtgcaatgtggcggcccagagcacacactctgaaccatcttgacacatcttcactggttactagacccccctcagcctgtttccttggctgtaaaatggggatgacgctggtccctacttcctagggctctgagcaggagtaagtagcttgtcgtataaaacatgttccctgcagtgcctggtgcctgctaaatgttccataaacgtcagctgttattttcattcaggggaagctgaaatccatattttcatggaaaatctcccagtttttaaatgtggaccaataatttcagctttcacaaacccagtatgagtcggtatggcccctagggtgccaactcaaaatctctgttgagaattttgctgataggaagtggcctccttggaggtgtttgctgtgtcctgtgtctggcaagtggggtggttttgataaacgtgctggatggatgtatgggtgaatggataaatggaggaatgaatggagaaacaaatgagcaaatgaataatgaatggatggatgaatggatgagcgaatggatggatgaatggatgagcaaatgaatgatgtacacacaaaggaatggataaatgatgaatgtgctaatgaatttaagaatgatgaaagaatgaatgaataaatgaacaaatggatggatgaaagaatgaatgaatgtactaatgaatgaatcaatcaatgaagaaccatttaaaaatgaatgcaactgagggtttataagaaaaggtatcttaagcctgggcatggtaattcatgctggaatcccaatgcttagggacgctgaggcgggaggatcgcttgaacccaggagttcaagaccagcctgggcaacacagggagacctcattgctaccaaaaacaaaattgttttaattaagcgggcatggtggtacgtgcctgtagtcatagctacttgggaggctgaggtgggaggatcgcttgaacccaggagttcaaggctgcagtgagctaggatcaagccactgcattccagcctgggcaacaaagcaagatcctgtctcaaaaaaaaaaaaaaaagatgtattttagaaggtaaattcaatctgtccaaaactgagctctgaccttcccctaaacctgtgcccattcagtggatgagagctccatcccttaaggggttcaccaattcatccattcctttgtatgtacatcattcattcaccttggctcatccctctctcttacatccacaccgttccatcagcaaatgttgaatctgtcttaaatgattcatcccaaatcctccccgcttaactaccacccaactccagcccccatccatcatcatcatcacttgcctggatgggttcagtcacctccagcctggtctcccagctcccgtcctcacctctcactgtctactctcccactcggcagccagagggtgcctgtgaacacccaaatcaggttccatccctcctctactcagaaccctccacggctcccccctcactcagggtaaaagccaaagtcctccttgtggtccaccaggccatgcatgatctgcctgtcacctccctgccttcaccaccttcctcttttcccctcaaccactccactccagccacactgacttccttgtgctcttccccaaaaatgtcgggcagacacattcatgcttcaggaccttaaatttgctgtttcctctacctaagatactaaagtgacaagtcaacacactcaccttgaccatgcaatttaatgttgcagcctaccctgtggactctccaagggctcccagtccctctgtgatgctttactttttctcttaaaaaaaaaattgttatttaaaagaacttgtctcgctgtgttgcccaggctggtgtcaaactcctggcctcatacagtcctcccattccagcttcccaaagtactgggattagaggcatgtgccactgcacccatcccaactttttttttcccatagcacttttcattttccatcccactgttaatttacttattacgtccactgtctgtctcctccccttagagggtcagaccccggaagtccaggctctgttgcctaatgtatcctgagcccctggaacagagcctggcacaaaataggtactcaataaatgcataagagcaaaactatatgtaggcagaggacacacccagcttattcctcagtgatcacttctaaagttaaatgtccatggaaaacagtctcatccacatctctttctggaggccttccaagcgtgctccatgcagctctgttgcctgcccctgcatcagggaatggaggctctgctttatcctgccctgtggtgtgactcccagaggcatcagatgtggctgggagtgggagacatggaaaattggctcctgcaacagagaactatcagccttcccatcaattggttacttctaattctgttatttttcaggggcactgtcttctcataagctccatctatgcaaaactaagcccatgggtcatgatggttccctcaggccagaggcttgctggagagactaatggatcccctggctaaaatctgtgcttgggctgcacattggttaatttcttctgaaggaacagcctgagcctgacattctccatcttttccctggcaggttctcccttcgcccgagccagcattaaaagtgccaagctggagaactcgaccttttttcacaaaaaggagaggaggatgcgtttctacatccgccgcatggtcaaaactcaggccttctactggactgtactcagtttggtagctctcaacacgctgtgtgttgctattgttcactacaaccagcccgagtggctctccgacttcctttgtgagtatcacccagccccacccctgccaactccctgatccctccctcacaccctttttccacttctctttctctggtagtatgtgtatcttctttggtcctcattgaatctgccctttcctttagccatttctataactgtcactggggccaatgttactgttgctatgacaatggaacccatctcccttagacctgagagctggaagctggaattcagaccaacaaatgctcctgtgattcctttctaagagagagggacagaggggtgctggtgaaggggatgttggaagagagacagagaaagacggagctcataagatagacagatagaaacagaaacatacatgtattaataatttttatgtacatctctggaaatgttcataacttatggttaagagaggatgccttagaaataaggagtggcttatatgttgccctcattttctctacttatttctgactctacttctctcttctttcaaaccttctgcttctttcctgttaggttggtgcaaaattaattgcgttttttgccttttttttttttttttttaaccacagttacttttgcaccaacctaatacttcctcccctgccctttttggcttccttattcattcatagaacatcccctccagtatctgcgagagcgttttgctccctcaaggtacaaggcccactaaggctttgccctctgggcctattcccagattctatgtgagttagcatgagatagtatcaaaattgagggccaagtgagggtgaggaaaagcagcaaaagatggggagatgtctgagcaggatttaaaaagtaaagagctcgaggaatcaacaagagcagcgactggggccaggcatggtggctcacacctgtaatcccagcattttgggaggctgaggtgggtggatcacttgaggccaggagttcaagaccagcctggccaatatggtgaaaccctgtctttacaaaaaatacaaaaattagccagatgtgatggtgcacacctgtaatcccagctactcaggaggctgaggcactagaactgcttgaatccaggaggcagaggttgcagtgagccaagatcatgccactgcactccagcctgagcaacagagagagtgtctgtctcaaaaaataaagtaaaataaaataaaataaaataaagagtagtgattgggcagtgaggggggcaggtggatgccctggctttggctcacaggccccaagtaaggacttctcaaaacgtcttttgcctactggctgtctaatttattcactgaccttctgacctggttcagaattgacttaggacagcaagaagagacagtctagtctttgacctagaaaggcccgtgagcctagtccaggccattgtcttcttataaccctccttgttcccagtcacgttggctgaccccccaggacacccctcaggaaccagttctccttcccagggccctgacctagtttcaaacttagtaattgtttttagtccctctggagtctcttataaatgaggactctacttcgtgttttaacttcctctaatactctatttttaatctcctatattctctctactaatcatcttgtacagtctgtcctggttcaggaacaagggactgagacttcctgcctgggtcctcagtgtctataaaggtcctttactcattcccactttccctttgagaaaactgagacacagagaggttaagtagattgcccaggatcacacattagcttggcatgatggcgggcgcctgtaatcccagctacttgggaggctgaggcaggagaatcgcttgaacctgggaggcagaggttgcagtgagcccagatcatgccactgcactctagcctgggcaacagagctagacgccatctcaaaaaaaaaaaaaaaaaaaaaaagatacacattaatttcagagatgtcaaaatataaacaaaaatgtatatcttggcatcagtgaagtgtagttgtttctctggatctcagactccacatctatgtggtagaaaccggatttgatggtcctgaaagttcttccagatgcaacaatgctaaggataagtaattctttcaagtcttgtgcatcacctgctatcatgtttccatggtaactgaggaacaagatctcagaaactcttcagtcctcccagagttacttctggtgggtctaggaatgtgtcagatgttacaaacagacttcctctgctgatattttggtcctaggaaccctagagttcccctcagacactaagatctccttagcgtcctataaataaggagaaattttggtgataaatactgtgaaggactttgacggtcagttcaaaacacctcttaaaagcatgacatagcaaacacccttggcaaatatcttagttcatttgtactgctataacaaattacccgagactgggtaatttgataagaacagaaatttattttctcacagttctggaggctgggaagcccaagatcaaggcattggcaggtttccctgtctggcgaaagctactctctgcttccaagattgcaccttgaacactgtatcctctggaagggaggaacactgggtccttacatggcagaaggtggaggagcaagagggacaaacttcctctgtcaacctcttttataagggcacctaatcccattcatgagagctctaccgtaatgacttaatcacctcctgaaggccccacctcttaatactgttacattggcaattaagtttcaacgtgaattttggaggggacacaaacatttaaaccatcacaaccaccaaacacaattagctttgtggccttaattagctatatgaaattcatggaagttagtttcagtcctctgtctctttcctttctgtatgctttctgctcctcagaaaccctcctcatctctcctttctatccattaagtacccacgcccttcctaactcctcatcttcctaccctaccaagaaagccctctcagaaaaggatctgatgtcagccatttatttgctggagcaaatgcatatccatgttttacccctccctgaggcatttgcaattttatgcttgctcatcaaagaacaaaaggctttgtcttactcaagactttttaggtcactcacaacacaggatttctaggggacataagacaagttttctgagttaggagaaaagccataccttaggtgggttgcctgtgtcgctccaactaagtacttaacttcaggattacaaataggatatcattatgatttctatttccttttatcctttggagctcagtcacgtagaagtagattaaatataattgttagatcacagcaccctggcattatggggccgttatggtccattgttattatgtgaattattcagttaattagtttattttttaaatgtgataaacacccaggaacccaccagtcaacacaaaagtccttggcaataatctatatccgatccttctcatcgaaccagggcaaaaactacaagatggagacccactgatatttttctcattccttttaaaatcggcctaaggttggttagcttgttggttggagggtagggcataattgttgctttttttttttttttttttttttagacaaggtcttgctctgtcacccaggctacagtagggtggcccaatcttggctcactgcaacctccacctcccaggtttaagtgattctcatgcctcagcctcccaagtagctgggtttacaggcatgtgtcaccacactggctaatttttgtatttttagtagaggcggggtttgccatgttagccaggctggtctcaaactcctgacctcagttgatctgaccgcctaggcctcccaaagtgctgggattacagacgtgagccaccatgcccagccagctcttcctttttaacagaggggaaactgaggcccatgggaaggacaccttggacagggcgtggccacagtgggtcatgtatataatcccagcactttgggaggctgtgctgggaggatcacttgaggccaggagttcaagaccagccagggcaacatagtgagacccccatctccacataaaaattttaaaaagaaaaaagataagtcagaagttgggtgtggtgacacatgcctgtagttctagcatgttggaggccaaatcagggaaactgtttgaggccaggagtttgaaaccagcctaacagcatagcaagacctcatctctacaaaaaataaaaagtttaaaaatgataataaaaggaaagtcagagccacctggaacccctaccctcagcaagcctaacctcctctctgtttcctccttctcccttctagactatgcagaattcattttcttaggactctttatgtccgaaatgtttataaaaatgtacgggcttgggacgcggccttacttccactcttccttcaactgctttgactgtggggtaagtgctcttgtttctaagagttcatttctccagctcttgcctggaatgacagatacctggacacattaaagggagaaaggtaaagtcacccctgaatatgagagactcagatggatgcagaaggaatgagaaaacaatcccaaacactggcaaggatacagtgtacccagaaccctcaaccaccgccagtgggaggaaaacgtatagaccccctttggaaagctaagtgggggacataagacaagttttccaagttgggagaaaagccatgccttaggtgggttgcctgtgtcgctccaactaagtacccaacttcaggattacaaacaggacatcaatatgatttctatttcttcttttcctttgtagctcagtcatgtggaggtagatgaagtataattgttagattacaacaccctggcattatggagccattatggtcctttgttattttgtgaattactcagttaattaatttattttttaaatgtgattaacacccagtaacccactagtccacacaaaacctaagtcctggagaataatctacgtccaatccttctcatcgaaccagggcaaaaactacaagatggagatatgacccagcattccattgctaggaattcatcctagaaaatctcacccagatacctaggagacacaggccagaatgtccctgcagctggaagtgaaattaaggttgttcgcaaataagtggagaatgcctggcccagggcagccctaatcatttaccatagtcctgttggtctcagaaaggcttaataatttatttatttttttttattttttgtttttattttttgtttttgagatggagtctcgttctgtcacccaggctggagtgcggtggcgccatctcggctcactgcaagctccgcctcccaggttcactccattctcctgcctcagcctcccgagtagctgggactacaggtgcccgccatcatacctggctaattttttgtatttttagtagagatggggtttcaccgtgttagccaggatggtcttgatctcctgacctcgtgatccacccgccttggcctcccaaagtgctgggattacaggcgtgagccaccacacccagccagcttaataatttataataactgaatgttgtactgttttctgccattatagaaaattatgttgttggagaaaacaaaatacatacaaacaagcaaaccttccctacataaatgacccaagtagttaaagaataaaaccaatttctttccattaaaaagaaaagaaagccgggtgtgatgcctcatgcctatagcctcagctattcaggaggctgaggcagcagaattgcttgagcccaggagttgaaaaccagcccaggcaacatagcaagaccctgtctctacaaaaattaataataattagccaggtgtggtggtgcacacctgtagccccagctactcagaaggctaaggtgggaggattgcttgagcccagcagtttgaggctgcagtgagctatgatcacaccactgccctccagcctggacaagagagtgagaccccatctctaagaaataaaagtaggccaggcacagtggctcacacctataatcccagcactttgagaggcggaggcaggtggatcacctgaagtcaggagttcaagaccagcctggccaacatggcgaaaccccgtctatactaaaaaaatacaaaaattagccaggcgtcgtggcacatgcctgtaatcccagctacttgggaggctgaggaaggagaatcacttgaactggggaggcagaggttgcagtaagctgagattgcaccactgcactccagcctgggtgacagaatgagactccgtctcaaaaaaaaaaaaagaaaaattttaaaatgtcctgagcaaccttgtttgtaatagttccaagtctcaatatccgtgtatccctttgctgtagaacagataaatattttgtggcatatctatataatgaaatactctgtgacaatcaaagtccaccaacagcagccacatgcccaacaacaggaatgaatctcacccatgtaacatggcacagaaggaggcaggagctagcaacgtaagtccatacagttcatgcaaagttcaagtggacaaaattaaactctctctctctctctacatatatatatatatatatatatattttttttttttttttttttttttttttttttttttgagacagagtctcactctattgcccaggctggagtgcagtggcgcaatcttggctcactacaacctccacctcccgggttcaagccattctcccgcctcagcctcccaagtagctgggattagaggcatgcaccaccacccccggctaattttgtattttttgtagagaccgggattcagcaatttgcccaggctggtctcgaaatcctgatctcaggtgatccacctgccctggcctcccaaagtgctgggattacaagcgtgagccaccacgccccgccttaaactgtattttttaaggatgatacttgaatacgttaaaaaggcgaggaccttgaaaacacaacgctcggtaaaagaaaccaaacacaaaaggtcaagtattgcataattccatttgtatgaaatgtccagagcaggcaaatccatagagacagaaagtagattagtggttgctagggtctgggtgagggagagtggggagtaactgctcatggggacagggcctcctttgggggtgatgaaaatgttttggaacttgatagaggtgatagttgcagaatattgtgcatgtacctaaaggcactgaattgtgtaattcaaagtgtgaattttatgttatgtgaatttcacctcagttttttttaaggtaagaaaatggttattacaaaattcaggatggtagttatatcacagtgtctctggaaacttccagggtatccacatgtccctttttattttattttattttttattttatttgagatagggtcttgctctgttgcccaggctagagtgcagtggcaggatcatgaccctctcctgtctcaaattcctaggctcaagctatcctccctcctcagcctcctaagtagctgggactataggcacatgccaccatgcttgactaattttttttttttttgtaaagtcagggtttccctgtgttacccaggctggtcttgaactcctgggctcaagtgatctgcccacctcggcctcccaaagttccagaattacaggcatgagccactgccctagccttctcctaattgttgacataggtagtagttgcatgacattcactttgtaattatgtgtttcaggaattctcaggcctgtgggagctcttaataaataaaaaagaggccaggtgtggtggctcacgcctgtaatcccagcactttgggaggccgaggcaggcggatcacgaggtcaggagttcgagactagcctggccaacacagtgaaaccccgtctctactaaaaatacaaaaaattagccgggcgtggtggcgggtgcctgtaatcccagttacttgggaggctgaggcaggagaatcgcttgaacctgggaggcggaggttgcagtaagctgagatcgcgccactgcacaccagcctgggtgataagagcaagactccatctcaaaataaatgaataaataaaaataaataaataaataagaggccgggtgcagtggctcaatgctttggaaagtggaggccaacagttggagagaccaaagcaggaggatggcttcagcccagaagtttgaggccagcctgggcaatactagcgagacactatctctataaaaatgttttaaaattagccagatgtggtggggcacacctgtaatcccagctactcaagaggctgaggtgggaggatcacttaagcccaggaggacagtgctgcagtgagctatgattgcgccactgcactccagcctgggtgacacagtgagacccggtctctatagataaatgaatggatgaatgagggggtcaaggatcctcacccggcttccatttggagggaggagtttggttgagttcttgcaaggttggtacctaggaaatgcttgccagttctggagcccagacactgtccctggacatgagaccaggttctctgccctaggttatcattgggagcatcttcgaggtcatctgggctgtcataaaacctggcacatcctttggaatcagcgtgttacgagccctcaggttattgcgtattttcaaagtcacaaagtaagtctttggggttcctggacatttgtacagggggtggggatgggggacatggtggggccgcctccagaaagttgggaaagtgagcctcgtgtttcgagggctgactccggggccctgcctcccccgcctggcctgagtcctcgcctggcctctgtcggcaggtactgggcatctctcagaaacctggtcgtctctctcctcaactccatgaagtccatcatcagcctgttgtttctccttttcctgttcattgtcgtcttcgcccttttgggaatgcaactcttcggcggccagtaagtccttcacaggaattccaactcctggttccctggggtcaggctcagggaacacacagtcccctccaccgtgcaggctgccttcctcgtagcccagacacccattgcggtcacccaaatgggcagggccctgggtaccactcagggtttcctggggacagagatgatggagacgttcgtttccttggagatgagatactgagccacaccctcagagcaccccgggtggggccaacgtgaaatgtctgtgtcctccctgcaggtttaatttcgatgaagggactcctcccaccaacttcgatacttttccagcagcaataatgacggtgtttcaggtacagcctccacctggccccacgggccaacacctctcagtgtcacagatgaaagtgcctgctccacatccaaggggcttccctgaactcctccttctctacctggccttttcacaccactttgaaacacagattttatggttatcattattcaattatggtgaggccaacagatcaggagatgaatgtcattggaaagatagtttgtggctgggcacggtggctcacacccataatcccagcactttggccaggtacggtggctcacacctgtaatcccaacgctttgggaagcccaggtgggcggatcacttgagatcaggaattcgagaccagcctggccaacatggtgaaaccccatctctactaaaaatacaaaaattagccgggcgtggtagcacatgcctgtaatcccagctactcgggagatgaggcacaagaattgcttgaacctgggaggcagaggttgcagtgagccaagatcgcgccactgcactccagcctgggcaacagagtgagactccatctcaaaaaagaaaaagaaaaaaaaaaccactttgggaggtcaagatgggaggactacttgaggccaggagtttgagacaagtctgggcaacatagtgagactccgtctctgcaaaaaaataataataataattagctgggcatggtgatacatacctcctagctactagggcagctgaagtggaaggattgcttgagcccaggaggttgaggctgcagtaagctacaatcacaccactatactccagcctgggcgagagagcaaagccctgtctcaaaaacgaaaagaaagtttgttatactcacagatcctcagagaaggagcacaccatgcaggaccaagcagagaagcaacagggtcaagcaggaagagaaggaaaatgtgggcaagaggcttgattgtggtttccatgggacggaatgggtgaggcagagtaaacagctcgagactggctagtttggatcatttcagtgggctctggggcagaggagctgttcctacttgtctaggacctggccttggggtgattagggcaggtggatagtgctgggaagataaaggaggtggttgggatatgggctggttgggatattgtttggtttgcttttaaaaagcctgctcagggctaaattgtttactacctctagggactggctagtgctggaccgggcagtccctccagagtcagcaagaccccagatgcatcagaataaagaaaataaaatgcgtggccaggccaatgaggtggttcatgcctgtaatctcagcactttgggagaccaaggcgggaggattgcttgagcccaggagttcaaggctgccgtgagctccagcctgcaccacagagcaaggccctgtctcttaaaaaaaaggcagagaaaaaaaatggctaatacacccatcaaatctgaagataccttggtctcatattccagggtgatcaacccaaagcaacttctgcacccatgtgggcgcattccctgaggcttgggactggcccagccgggaccttcagagcatctttggtggattctttctctttgagggactgagagtgtatagaaaatgtgacttcactctctccttctcctggggaggtagtttctaaatgagaccccaagacagggagttgaagaggaaaccttccatgaagggaagttctgagcccccacataagcgattttttttttttttttgagatggagtctcgctctgttgcccaggctggagtgcgacggcacgttcttggctcactacaacctctgcctcctgggttcaagcgattctcctgcctcagcctcccgagtagctgagactacaggtgcatactaccatgcctggctaatttttgtatttttagtagagacagggtttcactatgttggccaggctggtctcgaactcctggcctcgtgatctgcctgcctcggcctcccaaagtgctgggattacaggcatgagccaccacacctggcccataagcgattattaatagcactgatcgctagtcatgtatctttagctcagaggttctcacccaaggacaagtctgtcctccaaggacatgtagcaatgtctgcaagcattgttggttgtcacagctagggagagggtgctactggcatctggtgggtggagactaggaatgctgctcaatatcctacaatgcacaggacagccccaaatagaataatctggccccaaatatcagcagtgctgaggcttagaaaccctgttttagcagattcatgtttttggagttctttaacatttactttatcctcatggggatatggatagaaggaaggaagttggatcttttttaaaggagcatgtaggtgctgtttgaatatccccttggttctttcagtatgcatcagcacaacttgcgtctgtcaacacctaatcctttgccttggtctttctctggtcccctgctctgcccccaaggaactgcagtccagcagtactgtgaattttttgtgccacaccttaaaaggagcagccgttggtggataaataccccagctccctcaccctcaggtgggatgacccctagagctccccagcaagaccaagccccggttacctacagtggaaactcgcttgatcacatactgtttacgttccaccctcttttcccttttctcacttctcctctcccctactggtgcttcctgagatcacctcccagacaaaccacttgcacccgaacccttgttccagggtctgcctcaggcagggggaccccaaacgtgtccttgtgctacatttgtgctatccacgtagtagcttgtttaatcatcaccatgaccacatgaggaacacaggtaaatattaaaatcctgtcttagtctgctcaggcagccataacaaaataccacacactgggtggcttatacaggaaacatttattctctcatagttctggaggccgggaagtccaagatcaaagtgttagcagggttagttagttcctggtgagggccctcttcctagcttgcagatagccaccttcttgctgtgtcctcatatgtcaaagagagagagagagagttgtgatgtttcttcctgttctttttttttttttttttttgagacaaaaatctcaaaaaaaaatctattttttttttaggcaaatcacatttttttgtcacccagcctggagtgcagtggcacaatcatagctcactgcagcctcaaactcctaggttcaaacgatcctcccacctcagccccttgagtagctgggactacagatgggcaccagctaatttttttaaattttttgtaaagatggggtcttgctatattgcccaggctaatcttgaactcctgggctcaagtgatcctcccaccttggcctcccaaagtgctgggattacaggcatgagccatggcatgcggtctcttcctgttcttataagggcactaataccatcatgaagtcccccatgacctcatctaaccctagttacctcttaaaggccccatctccaaataccatcccatcataggttagggcttcaactcatgaatttggaggcgggcacaatttagtccataacaaatccccttaatcacatcaagtaagacagagttacaggagggtctgtgactcctccagggtcccattttcctagaagccaggctaagagccccacgacgcaggaacggccctttctactcgcaaacaaagagaaaagccaaggagaagccaacacggagtctggctctgcaaaccgggcaggattgttaaagacctcctgggctcggggatggggtgggcggattccggctccacagctgcatctccaaggggcccgtggctgagaggggggttggctgtgtgtttcttcctcccctttcagatcctgacgggcgaagactggaacgaggtcatgtacgacgggatcaagtctcaggggggcgtgcagggcggcatggtgttctccatctatttcattgtactgacgctctttgggaactgtatccttcatggagagagagaaggggacaggcctggacctctggcagaggagaggttgcaggggctcaagggagggtactgagagacccagatacccagggcccaagtggtgtcccaccagtggttgcttttcctgactcagacatttgcagacaccctcctgaatgtgttcttggccatcgctgtggacaatctggccaacgcccaggagctcaccaaggtggaggcggtgggagaatgtttctctggcaaagttaccacctgcccatggcagatcaggacgggggtgggggtgggggtgggggtgggggtgggggcatgggaacagggttagaacttttgccggggatgcaccatgcaaagagaaggcgcctctccccccactcccagaaacagactgtccctcatcaagcaaattctacagccaagagggtgggaagggggaaggcagtgaggtcgctgcaggaaacggatggcaaactcaaccaaaaggccgtttacagggagtaagcagggtttccaaggaatggtgtagcccccaggctagtggatgggagagggagtgctgttatggggacccagtcagagctggggccaaggaaaaagggctgccaccagccctgggaccttagagaacccagaaccatggcaaggcacagatggagtggccaataaatgtccccaccttctctcttcctctggcttcccgctggagcctccccttagccaaacgcagcatgttaagagctagcctccgtccagcctaagcctctccccaaggaccctattaagttaagattacatgtaacaggtacagggtcttcctctcagccctggggtctccctcagcattgcagccccacctccagtgcctcgaggtattcaggacatgtttgtgaaattgaaccaaaccaagcagacgttgccaacgctccatctgccggccctggcaggagggagagagagtttcccggccccagctcccagtggagggaagcggaagtctctgccatcccaagcacacggccacaagcctggccactgtggagctggctggcatggctgagccgagggctgatccagccatgagctcatccaagttccaagagtccatccttaggggctggtgcaggagggtagcagaaggggagggagaaaggccagttcgtttatctcctgggaggtgtggacattcctctccagatccacattctttctttcattgatcctacaagcatttcttggtcatttaatacgtgtttttaatcctattcagtcctcatggaaaccttaggagccaagttctctgagccccattttacagatttcatcattcagtaagcacttaatgagcacctactgtgtgaccaaggccctggtctaggacttagggattaagcagtgaacaaaaaaaggcaaaaatccctgcctccgtggagcagggattcaagaggggagacagacaagaaacaagataaatttgtaaacatacgtagcttgtcagttggtgataaacacaacagagaaaaattcagtagggaaagtcagggagagttggaattttagatgagatgtgtgtcgcacagagaggttgagagacttgcccaaggccacacagcagtaagttgtggagctgggatttgaacccaggccgtctgggtctgcagcttgtgctcttaactgctgtgtaccagttgcttgaatttgggcatgttttatgctcacttgggaacctgtgggaaatgcagattccagggcccagcactggttctatagattatttggggagcctgaggatctgcattttaggtgtttctgaggcagatggtccagagacctagctctgaaaaatgctgggaatggtgccaggaggggtgggggtggccctatgagagcagggtggccagccagatcccatctccatgttgtctctgacagtgtcctgatctgaccatttccaaggtggtaaggttgctccccgttccagtgattcggagcacagcgggagagctgcctgcaatggcatgacttttcttatgggcgggttcatttctggccatttctttctcgttgccttttctttgctttttctttgttggcttttctgttttacgaatgaggccctgcatgaaggctgaagaaggatttaaagtccaaaaacgtctttttctgtatgtatttttaaaacctcttcccccattctcctcctctctgaacctaaccaccagtgagcagcagcaccctgggcagttggctgtagcccaagtgccctgctctcctctccccaccgccttcctgtcatgggggctgggaatataaattcctctcctcattctccttctgggggctgttgacagtgcatggcaggggccatcggatgccaggctcttctgtgtgtgagggtagttggtgttttttgaaagttggttcagagagttcacatggctcagaaagcctagtgagaggaaaatctttgcactgctttccagctcattaagacaggatgcaggggccaggcatggtggcacatgcctggaatcccagcactttgggaggccgaaatgggaggatcatttgaggccagaagttcaagaccagcctgggcaacatagtgagaccctgtctctacaaaaaaaaaaaaaaaattaaatgtatacaggcatagtggcatgcacctgtagtcccagttgcttgggaggctgaggtgggaggattgcttgagcccaggagttcaaggttacagtgagctatgattgtgccactgcactccaggctgggcaaccaagggagactctgtctctgaaaacaaacaaaagaaaaaaaaataggctgcaggaaagtcttcattgtaggaagagaagggacatttttattttttgttatctggctgtgtgttaaaataggcttcataatgagttagatgtcaaacttatacacagaggggatagcaatacacttaaccaatagcaggtacccattccaattggggagccttggttctgattggtcgaaatatttcaaatgttgcccctggtcagcaacagggtcagaagtgagtccccaaggcctagttcatgttttgtgaacaaagattccacgtgccttttaggacgagcaagaggaagaagaagcagcgaaccagaaacttgccctacagaaagccaaggaggtggcagaagtgagtcctctgtccgcggccaacatgtctatagctgtgtaagtgcccctaatccctgggatgctaccctggctcctgaacgtccacactatcccaggcacagatttgggaagcagtgggggtggtccttgacagaactgagctttaggaagagacacttcttgtccttccacccactttcactcaataaatatttggttagcagctgttatgtacccagcactgttctaacttctggggatacagcattaacaaggaggaaaaaaaaaatcccacctgtgtgtagccattctagcaagggaaggagtcaataaattagataaataagtaaattatatattgtgttagaaggcgatggaactacagagaaagtaggggagggaaatagcaaatgctgggagtgaagagagttgtgattttaaacgaagttgtcagggaaggcatcacctagaataggggtccccagtcccggggctgtggactggtaccaggccgaggcctattaggaacggggctgcacagcaggaggtgaacagtgagcaagcaagcattaccgcctgagctccacctgccgtcagatcagcaggcagcattagattctcataggaacacaaacactattgtgaacggtgcatctgagggatctaggttgcgtgctccttttaagaatcgaatgcctgatgatctcaggtgaaacagtttcatcccaaaaccaccccccacacctaggtctgtggaaaaactgtcttccacaaaactggcccctggtgccaaaaaggttggggactgctcacctagaaggttacatggcctgaaggaggtgagggaggagccactggggggcctggggaagggcatcccaggcagagggaacagcataggcaatggccctgaggcaggaacatgcctgatgtgaaggaggcctgtgtgactagaatcgaatagtaagtgtgaggaggtgaaggcaaggaggtgacaagcagattacacagggccttctgggtcaggggggaggacttgggcttttgcccctagccaggtgggagccatggagggttcttgagcagaggaggctgggacctgactcagatgctcacagactcctagcattcagtggggagtagagggtggagagcaggagtgggaggctgagatgtgggttggttcgcctgggtcatccatccaagctacagtgcctagcaatgctctaagtcctgtgaccatgccactgcaggaaagagcaacagaagaatcaaaagccagccaagtccgtgtgggagcagcggaccagtgagatgcgaaagcagaacttgctggccagccgggaggccctgtataacgaaatggacccggacgagcgctggaaggctgcctacacgcggcacctgcggccagacatgaagacgcacttggaccggccgctggtggtggacccgcaggagaaccgcaacaacaacaccaacaagagccgggcggccgagcccaccgtggaccagcgcctcggccagcagcgcgccgaggacttcctcaggaaacaggcccgctaccacgatcgggcccgggaccccagcggctcggcgggcctggacgcacggaggccctgggcgggaagccaggaggccgagctgagccgggagggaccctacggccgcgagtcggaccaccacgcccgggagggcagcctggagcaacccgggttctgggagggcgaggccgagcgaggcaaggccggggacccccaccggaggcacgtgcaccggcaggggggcagcagggagagccgcagcgggtccccgcgcacgggcgcggacggggagcatcgacgtcatcgcgcgcaccgcaggcccggggaggagggtccggaggacaaggcggagcggagggcgcggcaccgcgagggcagccggccggcccggggcggcgagggcgagggcgagggccccgacgggggcgagcgcaggagaaggcaccggcatggcgctccagccacgtacgagggggacgcgcggagggaggacaaggagcggaggcatcggaggaggaagtaagtggaggtgacctcgaatccgcagaatgacggtaacattaataatgacaacagccaaagtagcacgtgctgtgtatttgtttataaaaatatattataaaatgctgtatttggccaggcgcagtggctcacgcctgtaatcccagcactttgggaggccgaggcggatggatcacgaggtcaggagttcaagaccagcctggccaagatggtgaaaccccacctctaataaaaatacaaaaattagccgggcacggtggcaggcgcctgtagccccagctactcaggaggctgaggcaggagaatcgcctgaaaacagggggcggaggttgcaatgagccgagatcacaccaccgcactccagcctgggcgacagagtgagactctgtctcaaaaaaaaaaaaaaagtgctgtatttggccaggagcagtggctcatgcctgtaatcccagcactttgagaggccgaggcgggcggatcacttgaggtcaggagttggagaacaggctggccaacatagtgaaaccccgtctctactaaaaatacaaaaattagtggtggtgcccacctgtattcccactactcaggaggctgaggcgggagaatcagttgaacctgggaggtggaggtaggttgcagtgagctgagatcgtgccatcacactccagcctgggcaacagagcaagactctgtctcaaaaaaaaaaaaatgctgtatgtttttgtttttttgacacagggtctcgcctgttgcccaggctggagtgcagtggcagtcatagctcagtgcagcctctacctcccgggctcaagccatccgcctcagcctcacaagtagctgggaccacagacatgtgccacatgcctggctaatttttgtagagacagtgttttgtagagacagggtttcactgtgtttcccaggctggtctcaaactcctgaactcaagcattccgcctgccttagcctccctaaagtgctgggactacagggttgagccaccacactcagcctaatttttttacctttagtagaaatgaggcctggctctgttgcccaggctggtccccaactcctggcctcaagcaatcatcccacctcagtctcccaaagtgttcggattagaggcttcacagatggggaaactgagagattgagtgagctcctcaaggtcattcctctaaccagtgtccttgaacccaggctctctggcaccagaggccttgagcatttcagggaaactattaagagaagccccactgtcgtccagaattatatagtcttctgtgttcttgctgtgtgacttttgcaaagtgacttcatatctctgggcctcacacaatggaaatagtgggatctaattgggtcattgccaggattgaatgaggtaatgtatgcaaagggcctggaagagcagctgacacataataagtgctcggtaaatttagagcatttttggccattttcagccaactctatttacctaatgctattctttggaagtttgaaaagccactctgttgggaggccaaggtgggaggatcacttgataccaggagttggagaccagtctgggcaatagaggcagaccccatctctataaaatataaaaaattaaacagatgtggtggcatgcacctgcagtcccaactacttgggaggctgaggcaggagggtcactggagcccaggatgtctaggctatgatgagctatgattgcaccactgcacttcagcctgggcgacagagcaaggctttgtctcaaaaaataaaataaaaaataaagaaaaagaaaaggcactttgggccgttagaattgaagggagagcagagtttcaaagctttggatgcagcgggatgtggtggctcatgcctgtagtcccagcactttgggaggccaaggtgggaggatccacttgagccccggagttcaagaccagcctgcgcaacatagtgagacctcaccttttaaaaataaataaaaatgttagaaagcttttgaggcatcttccaggccagcaacttatccattcagaaccagcatcctctttttcataacgacattttgtaatactttctagcagatgctatagtgattctgcatatagggactcaacaacttacccattaaaatagacatcgtagacattgtcctattacaaattaacctgctcttagtcctcttttatattaccatcagggcataatattgatttttttaatgatgggtttaagtgatcctgttgtatgacatatgaggtaggccagcacttctcaaaatctaatgtgtatgtgaatccccagggatcttgttaaaacacaaattgtaattccgtagggctaaggactcagtggagcctgagattctgcatttgcaacgagctcccagatgaggctgatactactggtccagggaccacattttgagtaatgagactctggaggacatagtgaagtaattctgatatgtacaccatacacaaaatcaccatgaagtgacaggcacaaatgatggctaactctgggttgtgtggacaattcaaaccacatgaggggagttgccagcagtgtcaagatgttccacaatgttgaacacctcttggcaaagttccatatacaaaagagtctagtctttcttccatttatttaatagttgcattgcaggaaaatgcaatgtatattaaaaacatacaaaaaatatgttgtgttcttatgtaaaagagttaggtttaaactaaaagcacaggatcaggtgcagtggctcccacctgtaatcccagtgcattgggaggctgaggaaggagaatcgcttgaggccaggagttcgagaccaacctgggcgacataaggagacctcgatctctacaaaagaagttttttaattagccaggtgtggcggcaggtgcctgtagttctagctacttggaaggctgaagcaggaggattgcttgagcccaggagttcaagattacagtgagctatgattatgccattgcattccaacctgggcaacagaacaagtccttgtctcaaaaaaaaaaaaaagaaagaaagaaagaaaaaacccaaacaaacaagcaaactaaaagcacaggtaattacaagcaagatttttcacctctttgagggacattagaaagtcatgaagaggaaaagataagtctttcccatatgggactgtcatgtacatggtagggtatttagtataactgcctaccattctctaagtgcctgcagtgcccctcaatcattatgttattaggtttccacgtagttctacaacagttttctgaaaaccattgttctaggtcattctttcgcttcaatcttctcctatgggtttatgcattcattcagttagtatttactaagtgcctactatattctaagctcatgctgtgagttcagtcacacaactgcaagtgaagtggtctgagacattctgagaaatacgaccaagaaactgctcccagggtctcagggcaggtttccagaggagcaatctgagaagggagtagagtgtttcagtctaacaacagcatgtgcaaaggccctggggtggaccagaaggaggccagtttgcaggacatgactagtgacgagaaagtgacaaagaaattgaaggtgcattgatgagactctggggctgtcagtcactcaggggaatgagagatcaaaacgggagtttaggtggaataaagtgtttaccacagcactctctgtatagtaaagaccaatgaagagccaggtacaggccagtgtgatggttcacgcctgtaatcccagcactttgggaggcagagacaggtggatcacctgaggtcaggggttcagaaccagcttggccaacatggcaaaaccctgtctctactaaaaatacaaaaaattagccaggcgtggtggtggacgcctataatcccagctactcaggaggctgaggcacaagaattgtcctgcgaggcagaggttacagtgagctgagatcacaccactgcactccagcctgggcaacagaacaagactctgtctcaaaaaaaaaaaaaaaaaaaaaaagccaggtacagtggtatgcacctgtaatcccagctactcaggaggctgaggcaaaggattgcttgagcccaggagttcgagaccagcctgagcatttagagaatgggaggccagtatactaaataccctaccatgtacaagacagtctcatatggaaaagaattatcctttcctcttcatgactttctagtgctcctcacacaggtgaaaaatcttgcttataattatctgtgcctttagtttgttggtttatttagggttttgtttgttttttttttttttttgaggcagggtcttgctctgttgcccaggttggattgcagtagcattgctcattttagagatgagcaagacctcatgtctaaaaaaaaaagaaagaccaatgattattaattactcttgctattattactaatattactgttattatcagccttattaacagatctactgttattgaaggaggcagagtgacagggacaaaatgtctctccctaacaatatgccaggaagagtttttgaaagacaacagtaaacattggaaactacaagagcagcaaagcctggttgtgaaaggcaaggactttggggcaggcagtcacattcctgccctatcacttccaggctgtgtgactttcagaatttcactcctctctgggcctccatttcctcatctataaaatgaagataagaatagtagctacctccttctctgggtataagatttaactgagccgggcgcggtggctcatgcctgtaatcccagcactttgggaggccgaggtgagcggatcacaaggtcatgagttcaagaccatcctggctaatatggtgaaaccccatctctactaaaaataccaaaaaaaaaaaaaattagccgggcgtaggtggtgcacgcctgtagtcccagctactcgggaggctgaggtaggagaatggtgtaaaacccgggaggcggagcttgcagtgagccgagatcgcaccactgcactccagccggggagacagagcgagactccatctcaaaaaaaaaaaaaaaaaaaaaaaagatttaactgagttagtacgtgtaaaatgctttgagtggttcctggcttataccaagagctcaataaatgttagcaattttttgtagcattttggggtctcactatgttgcccaggctggtgtcaaactcctggcctcaagaaattctcccactttggcctcccaaagtgctggatttacagacatgagacaccatgcctggccatgttagctattattaatatgaatattattaagtactcaatgaatgctatttttagcagtaatagtaagcactcaggaagtgtcagctaatactgttagtaatactctcatcaataaacataaaaagcaataaggacccagcttgcccaaatcccacagatggttcctgctccctctcttcttcagaggaagaaactatctccccactttcacccccatagcctcagctggccagacccccattctgaaccaggggagtactgctaattccattattaatagacacatcaaacaatctggccgggagagacattattcatttggctgataaagaggttctaaggctctttggaaataaaagttcatgaagattcatgcactttaagagaaaaaaattcaagatcagtcattcatctgctttaaaaaaagtggcaaagataaaactttatttgagaatataaaataataaaaagacattttcgttctctgttgtgacaaagccagtggccttcggaggtctgccttgtacatttttcctcttcttcagtcattccttgaggctttttgcaaacgtaccctgtgtttttcattctccagcatattgataattttttttttttgagacatggtctcgctttgtcatccaggccccggagtacagtggtacaatcatggctcactgcagccttgacttcctgagctcaggtgattctcccacctcagcctcccgagcagctgggactacaggtgtgcatgaccatgcctagctaatcttttgtattttttgtagacacagggttttgccacattgccaaggctggtctccaactcctgggttcaagcgatcctcccacctcagcctcccaaagtgctgggattacaggagcgagctaccttgccaggccgatcatatttttttcctttttattcactttgtcttctcctcattcctaccttcatctgtctttcagtggctcactccagtgaaaagtggactgacgcacattctatttcatataattcaatggctgctggccccagatcccccataccaggtggccgagcccagtggccctgcagggtggacaaaatgagggtggaactttcccagactgtcagtaaaaatctatggaggacagagcttctgcctctcccttgcaaccaggcagtgccttctcccaggcctatctgcttgcaaagggaacttttgccaagacctgctccactctagaattcttatctctgctgttcgcatcctaattccacctgcatctgtcaccatgacaacctgctccccaaaaggaacaggaagagagatgctggacttttgagctccacagtttatcctgcatgggggtagggagtggttaattacttagcactctaattcttacggtacccccaatgggcccaagttggtttttttaaaaaaaaacagtcttgctctgttacccaggctggagtgcagtggcacaatcatagctcactgtagcctcaaactcctggactcaaatgatcttcccacctcagcctcccaagtaactggaacaacagtctcgtgcaactacgcccagctaattttttttttttttttttttttttagagatggggtctcactatgttccccagactgatctcaaactcctgggctcaagcgatcttccttcctcagcctcccaaagtgctaggattacaggcgtaagccactgtaccaagctgccccattaaagctttgaacaccagagagcccagctcagctgttttccagctgggtaactctgggtaactttgcctctctgaacctcagtctcctcctgtgtgaaatggggctgatcactatacccatctcggatggtggtagttgcagggattaaatgagttaatacgtgaggtccttaggacagggggtggggacacgagataagcaataaacaggaactgctgttattatcacccccacataatccgatctcagggtctgagtgtgccccaggcaaggtgtccacagccctctgcagaaggatgcccaagtgatcagctggcacaagaacgccacgcacagcaggtgttatgcaactggccacctattccaggcagaggatgccagatccccagggagaagggggtaggggtgcagcttcaaagttttctgccccttttgagttctccttggagacactttggaaatgaaacctcccggaaattgatattaggcctctgcaggctgagcttgttaaaatttcccaacaaacagagccaacagacgctctacaaggaagcaaaaacaagacaaaacacattggcagacccttttccatctgctcttggtagatggtattcctctaagaaaatgccgccacgagtttctccatggcttcttgagctggtggccaaaggatttaggttctctttgaaattataacttaactgggcctgctttatggcagggatatcactctctgaaatgtgtatatatatgtgtatgtatatatatacacatatatacacatatacatacacagggccaggcgtggtggctcacacctgtaatcccagcactttgggcggccaaggcaggtggatctcttgagccccaggagttcaataccagcctgaacaacatagtgagaccctgtctctacaaaaattaataaaaataaccaggcatggcagtgtgtgcctgcaatcccagctacccagggtgggaagatcgcttgagcccaggagttaaaagttgcagtgagctatggtcataccactgcacttcagcctgggcaacagagcaagaccctgtctcttaaaaatatattattattattatacacacacagacacacacagacacacacacacattacagatgatgagaaaatactctcagccaggttttcatgatacacaacttctcaaaaagcatcacaagcaggttagaattagggatttctttgtggactgtccaagatgttgaggaaatattggtttagaatttacctcatttaggccagaaatggtggctcacgcctgtaatcctaacactttgggaggccaaggccaatggatctcttgaagccaggagttttagcctggccaacatggcaaaatcctgtctctactaaaactacagaaaaaaaaaaaaaaattagccgggtgtggtggcacaggcctgtagtcccagctactctggaggctgaggcaggagaatcacttgaacctgggaggcagaggttgcagtgagccgagatcgtgcattacacttcagcctgggtgacagagcaagactccatctcaaaaaataagatagataagataaatatatataatatatatgttatatatataatatagaaactacagaacaagtgatctttgtatgtttccagaatataacagcgggacaggcataggatagacgttcccattgcaaaagggagaaattggaagggataaagaggtcaccagtcctaagcaagtgctaaatccagcaagacaaatcccattaggtttcaaggcctgagaataatcctcggtgactctcagctcattaacatacttagttctcagagccagactcaatgaggttacggcccgcatgttatgggtcaggaactgaggctaagtaactcactggagattatgtggtaaagaaggtccaggatcattgcttcagtctccaggatatggggaaggttctactcctgttatcccaaattttaaaatgtgggaactaaggctcagagaggttaagcaaatcacacagggttgcacagctagtgatgttgctgagatttccctgtgtgtagtggctcatgcctataatcccagcattttgggaggctgaggcaagagggtcgcttgatcccaggagtttgagaccagcctgggcaatatagtgagacctcatctctacaaaaagaaaaattaaaaagttagccaggcgtggtggcaggcacctgaagtcccagctactgggaaggctgaggtgggaggattgcctgagcctgggaggtggcgattacagtgagctgagatcgcgccactgcactacaacctgggcgacagagtgagaccctgtctcaaaaaaaaaaaaaaaaaaagacattgccgagattcaaacccaggtcagcctgtcttctgaaatgtccctctatgacccactcacaaaactgagaaggcagaaagttgcttggacctgtctatttcccctgtgcagtctcagagaaacagtggaactgcctcggtttctccttccgggaagtattcatagaagcatcccacttacctactttggtctgaaaataaattagcttgtctctcttccacttactaaaaacaccgtgggtttttgcaagttaaaatgcaaaaataaaatgaggagaatggtgctggtagtttagccagtgggaagccctctggggaaagccagccttttatttattacttatttatttatttattctttctagatagatttatgggaaaccagggctgtgttgtccaggggtctgtagtccagaaggcatcagatgggctactaagtgagtctttgtccacctgtagatggcaagaggcagggcccaggtgtccatggcttggagaggcaggggttgatgggaggtttgaggctgtgggatctctcctggggcctcagtatcctcatctggataatggggacattctggccaggcacggtggctctatatatccagcacttagggaggcctataatcccagcactttgggaggctgaggtgggtggatcactgtaggccacgagttcaagcagcctgggcaacatggcgaagccctgtctctactgaaaatagaaaaactagctgggtattgtggtgcacgctggtaatcccagctattcgggaggctgaggcacgaggatcacttgaatccacgaggcagaggttgcagtgagccaagatcctgccactgcactccagcctgggcaacagagtgaggctctgtctcagttaaaaaaaaaaagaaaaaagaaaaagaaagaaagaaaaagaaaatgggggtattcatttatcatttgacagtaagtttacccagcattgactgtgtgagaggccctgtactaggcagtgaaaactcagctaagaataagaaagttaaaaacaagctgggcattgtggtttacgcctgtaatcccaacattttaggaggccgaggaggaagaatcacttgaggccaggagtttgagaccaccctgggcaacatagtgagacgccagtctctacaaaaaattgtaaaattagccagacatggtggcgtgagcctgtagcctcagctacctggaggctgagatgggaggatcactggagcccagaagttcaaggctgcagtaagctatgatcctgccactgctctccagcctgggcaacagagtaagaccctgtctgaaaaaaaaaaaaaaaaagaggccaggtgcagtggctcacacctgtaatctcagcactttgggaggctgaggtgggtggatcacttgaggtcaggaattcgagaccagcctggccaaaatggtgaaaccccatctctactgaaatacaaaaaattagccggtcgtagtggtgggcacctgtaatcccagctactcaggaggctgaggcaagagaatcgcttgaacctgggagccagaggttgcagtgagccgagatcacgccactgtacgacagagcaagaaaaaagaaagaaagaaagaaaagaaataagatgatggggagttgtggaaacctgtccatgggcacgtgaaggtcttgacctctgaccaagaagtgaacaggctcctctcaattccaggcactgcagggatctgggacatgacttctccatgaccaaactgtaccctttccttttcttttttgtttttttggtgacagggtctcactctgtcacccagactggagtgcagtggggcgatcacggctcactgcagcctcaacctcccaggctcaagcaatcctcccacttcggcctcccaagtagctagaactacaggcacacagcgccacgcccgtcaatttacacattttttgtagaaatagggtctcactatgttgcccaagctggtcttgaactcctggccttaagcaatcctcctgcctccgcttcccaaagtgctgggattacaggcgtgagccactgcgcccagcccaaattgtactcttgaaagatggaatcttagctaggatcctgaactgttgccttttatcctaaatcagttgttggttctttttcattcacttgccttcctcagagagaaccagggctccggggtccctgtgtcgggccccaacctgtcaaccacccggccaatccagcaggacctgggccgccaagacccacccctggcagaggatattgacaacatgaagaacaacaagctggccaccgcggagtcggccgctccccacggcagccttggccacgccggcctgccccagagcccagccaagatgggaaacagcaccgaccccggccccatgctggccatccctgccatggccaccaacccccagaacgccgccagccgccggacgcccaacaacccggggaacccatccaatcccggcccccccaagacccccgagaatagccttatcgtcaccaaccccagcggcacccagaccaattcagctaagactgccaggaaacccgaccacaccacagtggacatccccccagcctgcccaccccccctcaaccacaccgtcgtacaaggtgagaccctctgctctcacatcactgggcaggggacctggcgtccctggagccagaggctctgctgagtgaccctggactgtgaccccatctctctggcctcagtctcctcccctggaaaatgggcataggcgtagtttcctaccccacagggctgtggagggttcagtgagataatttgtgcacagtgcctggcacggggttgtgttcagtcgggttagcaatatcttctacgtccttccttcccaaggggagccaggaagccaccccatttgaggagcaatagggtcctctgatggaagcttgagggggtcagatgattgattctctcggcccagcactgtccaaaagaaatgtaacacaggccacatgcaaatgtcagtttaaactctctagtcgccacattaaaaaaggggccagatgtactggctcatgcctgtaatcccagtacttcaggaggccgaggtagagtgagccaagatggcacctctgtactgcagcctgggtgacaaagcgagactgtctcaaaaaaaaaaaaaaaaaaaaaaaatggtgaactgctgggtggattatgtcttaagttcatctagtgtcagttctatgtgagagattttcatgagtttgctggataaaggctttccatggtcctgagacctaagatcctaaggtcttgtcactgtgcccattttatagatgtagggactgaggctcagagaggctcagcctgcccgtgggcacataagcaggctgggctgcagaatggaagctccagaggctgatggctcctccccctgagtcaagagaggggtgctaatgggggcatgccatgcagtttatgggaggtctcagtatttctatctgttcagtgggtctcttggcactctccctacctgcctgcaagtgagggtgtgaaggtccaacgaggataggggcaggtctgtgttaatatcccatgagggccccaccgcactcaaggctatagagtggttgagagcaggctctcgggggccaggccgcctgggttccaaatgccagctctgccacttcctgctgtgtgaccttagacaagtcactttacttctctgtgcctcaatttcctcatctgtaaacaggagatcagaatatatcaacctcagggctatacaagggttcagtgatgtcataagatgcctggtatatacagcaggcactttagaaatgtcagccgcttcttgcctgccctgggagtacacaggagttcccagagacttgtgggaaattgtggagggagccctgtgttggttcttgtcccaacagtgaacaaaaacgccaacccagacccactgccaaaaaaagaggaagagaagaaggaggaggaggaagacgaccgtggggaagacggccctaagccaatgcctccctatagctccatgttcatcctgtccacgaccaacccgtgagtatggcccccagcaagggcagggggggcctggggctcccaccagggtggcggaagtcaggccagatagagggcaatgagtgagtgttgaccaccatgagtccagggatacctttgaacaagttgaaaatggatgctccttccgtaagtcaggtaagatgatttgtcacaatatactttgttggaagagacccctgtcctgccatccactagaaaatcattgttatttatgacaataaataaacaaatttgtcataaataaacaaataaatttgtcctaaacaacaaataaatttgtcataaataaacaaatcttcactgtgatgtaagaggcacccccttagaaatggctgccttgtgcagtacacagcctgaacaactgcacgtggcagccctaggacctgaactctgtttctaacctagactctgtaagggtttagattctgggcggatagtgtctgagttccatggccttctgtcttgggcatctttgaaatggatagactatttaggggagaaatttatcccatgaatgtcgtagtggctcggaggttgttttagaattgaatgtctcccagggatatttcttgaaagcctgaccgctcaaaatgcttcttgacaatgaaggatcatgtcagataagatgggggagaagctgctttctataatctgcctcttggcaactcaccctgggtagtaataaataaaagtacctttaaagtacttttttatttagttgacttatcgattttactaaggaaacacttatgtggtatctactcagtgccaggcactgttctgagtgccttaaaattttttttaatttctctgaggttgttactatgcttagctccatttgacagatgaaaaaactgaggtccagagacgtgaattcacctgcccaaggtcacacagcaagccagtgggagagctggagtttgagcccagacactggctctagcctccttgttcttaaccactcagctctgctgccattcacacaaccttatgaactatttattattggctccacttattaagaggttaactggcacatcccattggcacattcaaggctctgataaggcctgcaattcataatttcaataactaactttttggagcccctatcatgagccaggcataaattaagtcttgggtctcatgattttgtgaagtaagcactagtattacggctattttacagatgagggcaccaaggcacagaggggacaagtaacttgcccaaggtcacacagctaatttttaaaaagaaagaaagaaatctacttaacccatagattcacaatattgtttggccctgggacatttaatatcgaaaagcctttttatctcctacagaattaaggaccgtatttcttcaacctagcttggggatcaagatacttcaagagggtcgtttgggagtgataggaactttgctaaacagggcatgtgaatgtcttctctcaccgaggtcccctctgccttcttggggttccaggacccagagagggcccccacctggaggagtttaatagtttgttgtgtaggaggccttgggggttggagatctcagtagtggtaggtaacatgagattatggaagaaaagggtttgtgagcctgtggtctgagtggacctctgcacgcccatctgtctccaacagccttcgccgcctgtgccattacatcctgaacctgcgctactttgagatgtgcatcctcatggtcattgccatgagcagcatcgccctggccgccgaggaccctgtgcagcccaacgcacctcggaacaacgtgagtcccacagagcacaccccttcctagcctggctgctctgcctcaggccactttctcctgcatccaaaatgctcataggtagggtgggatgttggggtcacccctaggcatagcccttatggctgctggttgagaggggaagctctgattccttggggatgctcttgggagcaagacattccttgaggcagtttctctgtgagcctggtggggtggaggtggcccagagtgactggggctgaaaattgctggattctctaatggaggcgtgagactagcaggatatggatgttgcacattctctacatggaataggggggttactggggcaggggcggtgctcagaggtggtcccctccgcagtagacatttccctttgtacacgaagctttgaaagaaacaactatttggctcagaaacacagcctaagcttttggtttttatgaaagcaagcccctttgcggatggtgggtctgttgacaacccctgttaattgagcacttgctgtgtcccaggaagaaactcagcatgcagtatctcatttaatcctcacaatgcgcccccccaaccccccgcccaggcatccccatttgacagatgggaaaactgaggctcaggggaatgagagagtggtaagtggcctgtccagggtcacacagcagaattccaactctgcatcccccaaagctcccactgcttcccccaactgtctgcatttactaatcacctactgtatgctacggatgggtgtgcatagcccctttgagtcctgacaagcaggaatgagtgcatgcttgtggttgagatggggaaaccgaggcaccaacaggcaagggcgtgcctcagtcatgggctgcgggcagaggcttgaccccagggcctggtagagggtggactggtggctcctgtttccctccccagctccctcccccaacccttccctcccaacccagagccaaaaaagtgtgttttctgctggtccaaggctctgctgccctggctaagtaggttaggacccaggcaaagctggcgagccccatccctcaagcccgcccacagcttaccatgcactttcccttccttcccaggcctggcaggcccccctggggacctgatgggggagatggaaggaaataattagaacgcagctcctggaggaagctagagccagtgctcagcctcctcacagtccgcttagttgcttcccgcagcctggtttcccccaggggcctccaggagccaggcgtggggaggaggtgtccctggaggggtccacaaaccccctgctgacgcgaggatgctgaagaaggcgttgccttcggcagggagggcacaggcatggatgatccagggggcacggcagctcccagggctgaagggaatctaggcagtgctcagaccaggccccagggactgtttgcaaagagcgttcagctccccggccccctccctcgtccatctcgcagtcgaaacttctctacaagaacactgtggccccataacgttcacaccacgtaaccaccatccagggcaagaaatagaacaaaaacgccccacgcggcatgtgcctcctcgatcccccacccccaccgccttctttccctctagagctgctggggacactgtctggagacatttttggttgtcacgacaggaggggggaggtgctcctggcatctggtgggtggaggccagggatgttgctcagcacccgccgatgcccaggacagcccccactctagaggatgatccagacccaaatgtccacagagcccagcttgagaaaccctgccttaccggtaaccacgaccccagcttctggaatgagcgtttttggcttctctctttttcccacctgcacaggctttttttttttttttttttaagagacaatgtctctctctgtcgcccaggttggggtgcagtaacgtgatcatggctcactgcagcctcaacgtcccgggctcaagtgatcctcccacctcagccccccaggtagctaggaccacaggcatgcaccaccacacccagctaatttttaaatgcttgtagaaacgggcctcgctatgttgccaggctggtctcgaactcttgacctcaagcaatcctccctcctcagattcccagagctctggaattacaggcatgtaattccaattcttacatgcctgtaattggccaacactggccaattcttaaaaactgaatttatgtttgctcttctgtaacattcaataaatgagacacttctatgcttcgcattaaatgagtacatgttgcttttgcaggattgatgggcattcttttttttttttttttttttgagatggagtcttgctctgtcacccaggctggagtgcagtggtgcaatcttggctcactgcaacctccgcctcccgggtttaagcgattctcctgcctcagcctccagagtagctgggactacaggcaggcgccaccacacccggctaatttttgtatttttagtagagacggggtttcacactatcagccagactggtctcaaactcctgacctcaagtgatccgcccgccttggcctcccaaagtgctgggattacaggcgtgagccaccacgcccggtcaatgagcattctttatgatgctgttttgagatttactgtgtggcatgggatgtgttatccatcccctgttgacagatgtttgggttgtttctaagtgtgaatactgtccccatgccacgcccctcaacatgtttcctgagtcacctggacagtaatttctccaggaggccagatgcagtggctcacgcctataatcccagcacttcgagaggccaaggtgggagcaatgcttgaggccaggagttcaagaccagcttgggcaacatagtgagacccccacctctaccaaaaaaaaaaaaaatttttttttttttaattaaccgagcgtggtggtgcacacctgtggtcccagccacttgggaggctgaggtgggaggatcacttgggtctggaaggtcaaggctgtagtgatccatgttcataccactgcactccaacctgggtgacagagcgagaccctgtctcaataaataagaattcctccagggtataaaccaaaagcgaagtttctagagcatataatttgcaagtggttggcctcagtaaatgcagcttgaatgtttattggacaataaacacagtgaccctttgggaggccaaggcgggtggatcacctgaggtcaggagtttgagaccagcctggccaacatggtgaaaccccgtctctaccaaaaatacaaaaattatctgggcgtggtaacacacaactgtaatcccagctactcgggaggctgaagcacaagaatcacttgaacccaggaggtggaggttgcagtgagccaagatggcgtcactgcactctagccttggcgacagagcgagaccctgtctccaaaatatatataaataaataaaaataaacacagtgggccgggcacagtgggccgggctcgcacctgtaatcccagcactttgggaggccaaggtgggtagatcacgtgaggtcaggagttcgagaccagactggccaatatggtaaaacctggtctctactaaaaatacaaaaattagccgggcgtggtagcatgcgcctgtaatcccagacacttggaggctgaggcagaagaattgcttgaacccgggaggcagaggttccagtgagccaagattgtgccactgcactccagcctgggtgacagagtgagacaccatctcaaaaaaaaattaaaaaataaatgaacgcagtggcccttgcaccagtagctcatgggaactcctgttcttccacatccttgtcaacacttggtactgtcgactgtttcatttggccgatctgctgggtgtggagtgagatcttattggggttgtgcttggcatttccctgtaatgaatgagatcaagcacttttttggattagactgagccacaggaaataacattttcaaatagatgaaaaagatctaagtattaggaatacttgaacctaatttattggtcttttgatttcctcttgcacagcttattaagagctccagaattagattcacctgacccccacggcctgccctttcccagctccctctcttccttctttccttccattcattcctttagtaagtatttgataagcaactactatgtgccaggtactgagcgagccagggaggattgacagggtatgagatggtccctgcactcccagagcccacaaaccaccaggcctttgaccaggctgtgcccactgcctcgtgcacctgaaatactctcccaccaccatcccctctgcccacccaggtctttcaagccaatccccttgcaccagcccctccctccaggaagtcacctcaccctgaccccaggcactctggtctctgattcctcttcaagcaccacatataacaggaatataagttataaccacacagatcacagagcccagctcctccaggacccagtacagccccaactgttgatgcattcattcaacaaacatttcttgagcacctactgtattcctgaccctgtattataagctggagacgccatggtgacagacagacatccctgtccttgtggggctgacatttgggtgggggagatggacaatgagattatcagtaactacaacaaatgttcagggagtgataagtggccgggggtgtggtgggcagagggaaggagagacttcgtaaagaggatctcaagcaccaggagatggaatttaaacagccggtcaggggagtcctcactgggaaagtgttatttgagctaagtcataaaggaggagaaagacggaatcaaatgggatgtgggggaaagcattccagagagacagaacagcctgtgcaaaggccctgaggtggaagcatcttggggaacaaaaggaagtgagcaagggagagaatgagaggaagtgagggcagggagctgaatggtcagatcgtgcaggggcttgagggcctcggggaggactttgacttttatccctgaatgaggtgggagccacggaggattgtaagcaggggaaggatgtgcctgacttctttggtgttcacagcgccctctggtggccatgttcagtaatgctcagcccttgcagcttctgggtggatctgattttttttttttttttttttttagacagtctctgtctcccaggctggagtgcagtggcacgatctcggctcactgcaacctccgcctcccacgttcaagtgactgtcacgccttggcctcccaagtagctggaattacaggcacacgccaccatgcccagctaattttttatatttttagtagacacggggttttgccatttggttaggctggtctcgaactcctgacctcaagtgatctgcctgcctcagcctcccaaagtgctgggattacaggctcgagccaccgtgcccagccggtgtccaccccatgtctagcaccagccagacactgtgccggcgcaccctcatcttcaggcctgggtgacaccagaggtgtgctatggtgtgtcctggacaggggctgggccagaggacattgctcgtccaggcagaaacatcaggcctggggaggggcacaggaaaaatcaacctaccctggcaggggcctggccttgaagcaggaagagatgccgtggcaggaagttggccccagtgtttaaaaaaaccacgtagcaactatttctcgcccaggatgcccaggaaagcaagggtactgggggattagatccatcaccaagaaggatacagtcagccctgaacttctctggggccgcttctaatccactacagggcttggggcaaattttaaaaggtacccttcccgtgggttagcgaactggcctagtacagtgatttttttgttaggatttgctgccatctgctggacaatttcattcacaacatacaaatctgcagtatgaaaagagatgggaggggcccttgtgcagtgcacgccctgcgcaactgtatatagcagctgtgtttcctcttctgggtagaaactctgctccccagtaggcgatcgttagttttaccggggctctgctggaacaggccagtgatccactgctctcttgcttttatcccttacaggtgctgcgatactttgactacgtttttacaggcgtctttacctttgagatggtgatcaaggtgagtgcagattataagtgagaacacacggtaatttttttttttaagcaagtgcagggctgggcacagtggatcatgcctgtaatcccagcactttgggaggctgaggcaggcagatcacttgagatcaggaggttgaggccagcctggccaacatggtgaaaccccatctctactaaaaatacaaaaattagccgggcatggtggcacatgtctgtaatcccagctactcgggaggctgaggcaggagaatcacttgaaccctaggctgcaatgagccgatgtggaggctgcagtgagccgagatcttgccactgcattccagcctgggtgacacagcgagactctgtcaaaaaaaaaaaaaaaaaaaagagctgggattccaggagatcctgagcctccaagaatgccccccttgagaggatgagtctcccagaggattagaaatgcctggtgtgtttgaagagcagcaaggaagctggtgtggctgggcggagtgagagaacagtggggaaacgaaggacagagagatgagtggggaggtgagggggcaccttgtgccggggatcacagagagggctcttcggctcttactttgagtgaggtgagggccatagagtgttctgagcagaggagggacttgatccaggtgttcacaggtgccctttggcatctgtgggaagccagaggacctgtgagcaggtgatcacactggtccccatgggcgatgacggggacaggatcaggctggtgaccaaagaagaggtgagaagtggacagattcttggaaggttctggaaatagagccagtgagttttgctgatagagccaccaatgagggatttgggacaaagaggcatcaaagaggatcccaaagtttggatctaagagccggcaagccagagctggcttccatcaggcaaaggggggccgcctcatggggcaggggctccccactcctccctggagtcctctggccactgcccatccctgcaagatgaggtggcctcattggcttccctgcctctccccgagaggctagagagtgggtggcagcaccccagggtggggatcaggtgggggttctgagcaccctctcttctcccccacagatgattgacctggggctcgtcctgcatcagggtgcctacttccgtgacctctggaatattctcgacttcatagtggtcagtggggccctggtagcctttgccttcacgtaagtctcctcgcaagggttcctcttgcctcttttcccccaacccccagcctgggccacacatcggattacaggacatgttctcagggtctagggatggggtgtgtgggctccggggacgtgggagatatcagcatgccaccaggaagagcttcgatggctttttgcatgatgtccatggaggaagaaggagaagggaccccccctcctgccaaccttctacctcctcacacagcaacgggcctcagccacatcactggccccttgctgtgcagcttcctgtagactagcctcgccggaacatctcatccccctactactccacaagcgccgcccaaaccgctgtctctttggaaagtccctaaagagacaatcaggaaacgaatgtgcatgagaattctgaccccctccctatgcctgaaggccccgtagttgtagacctggtgactccctttgtgtgtctttcacttctcctggcagtcctaggattctctgccctctgaaaggccatgtgtcatcctgcagctccaagatggcgccccagttgtaggcagccatttcaggatggcacccaagctcttagtagtcatcccaagatggcatccaagttctgggtggccattccaagatggcccctgagttctgagctatcattccaagatggcctctgaatttggggtggtcattcttagatggtccctgagttccaaggtgaccttcaagttctgggtagccattccaggatggtccccaagctctgggtggctattccaagatggccccaagttctaggcagccattgcaagatggcccctgagttccagggtggcccccaagttctgggcaaccattccaaggtggcatccaagttctgggtggctattccaagatggcctctgatttctgggctaccatgctaagatggcctctggattcttggtggccattcttacatggtccctgagttccaaggtggccttcaagttctgggtagccattccaagacggtccccaagtcttggatggctactcgaaggtgacccccaagttctgggcagccatctcaaggtggcaccctagttctgggtaaccattccaaaatggcacccaagttctagggcaaccatttcaaaatggcccccaagttctgggtgactatttcaagatggtacccaacaggtgagtggccattagcccttagggccctgatagcagacttagcagtacattcctgaagttgtagacatttggagcgggatgaaaaatatctaatcagtctttaatcaagaaacaaatcttggggaccctggctgtgcccatcatggtgaatgattccctgacaggttttgaaaggatcttgacacattcactcccatcgtgagagaatcaggggcttcctcctgtgcctctgcctctaggctccctcctgagccaatctggaggggcccttgaatggtctccctcaccaaacaatgaggacttggtttgtcaggagggccaaaatagtggcccatttccagtagaagggctgttaagtaggccacacttagattcttctctgggaacacaatgaggtcaagttgtgttagaacaaaaaatctccagagtttttggatgcctcagagctggagatgtatcatgaaggttgggaggctgattatacttctttctctttctctttcactccttcctcctctttctcctctctttttgttcgtttactcttttctttttctcttctcctctccctccccacatccttccctctcctcaaagcttttcagtgtctatttgactactagagcaatgcacggtggcttacacctgcaatcccagcactttgggaggctgagacaggcagattgcttgagcccaggaggccaagaccagcctgggtaacatagggagaccccatctctaaaaaaaaaaaaaaacaattagccaggcatggtagtatgcctgcactagcagctacacgggaggctgaggtgggagaattgcttgagcccaggaggttcaaggctgcagtgagccgaaatcgcaccactgcaccccagtctggggaacacaggaagaacttgtctcaaaaaaataaaaagtttaaaaaattaaaaatcaatgaatttgctatttagaatattatgctttatatggttactgaataattttaatagtgatgagtacaaaaaaaacaggtttagcaagctgttctgtaggttaaaaagtaaataaataaataattaattaaacaaaatacaatgcacatcaaattaggggacaaagattgtgacgaataagacaaggagtccatgtctttaaaatatgaaaagcagttacaaatcaataagaaacactacttctcaatggataaatgggcaaaggacataaacagaaatctgatagaatgctggcaactagtaaaaatggaggtaaatcaacccttggaattcagagaaatgtaaaataaaaacgagatacaattcattccctatcaagttagcactgttcccgccgcacccccacacacacacaaaaaatgatttttttagctaataaacagcatatataagaatgtattataataggctgggcacagtggctcacgcctgtaaccctagcattttgggaggccaagggagggggatcacctgaggtcagcagttcgagaccagcctggccgacatgacaaaaccctgtctctactaaaaaatacaaaaattagccaggcatggtggcggatgcctgtaatcccagctactcaggtgggtaaggcaggagaattgcttggacccaggagatggagactgcagtgagccgagatcatgccactgcactccagcctgggtgagaaagcaagattttgtctcaaaaataaaaaaaggaatgtattataataaaatatacttttctccccctctatcacctatttaagcaggtccttcaagttgtcaggtagacatcatgctatgagaaaatttaaatcctgaaaagccagaatgttttaccaccctcagcctggaatgaatccttctcctatggaaataacctacgggtttctccacccctctctgcctttcagccccttccctccctctcccctccttttctttctccctctttctcttcctcctttcccctctcttccctctctcttcttccctctctctgtctctttctgttcgtctttctccttttaccccctctcagtttctatctttttattttcctctttctctctctctctccctctctttctctctcactccctgcactgttgatgacctatgtccttgggtgatgtgggcctcccctggaccgtgtagcttggagaaagctgaccctctgtcatcggtctggcaacagggacttggcccccctaccctgcattctgatgaggaatggtattcagacaaaggcagatcccaggacacaggaggacatgctcaggcagggacccccgcccctttcctctggggcaaggtctgctcagcagcctccaagattcctagggctcaagaggtggcaggtagctcagggcactagggcaggcagtggggtgaatatgtcactcatatccacctgtccacacacaatgcttaccttggccacctgtgcccaggggaatgggttttatcctgtgaatcctcccagtgaccaccactgagtgtggcacagataaatggtaccaagcccaagctgttcaggtctccaatgtcactttcctctcagacctctgttgtagctgacatactgtaatgctgaggagggccgggcacagtggctcatgcctgtaatcctagctctttcggaggccaaggcagatggatcacctggggtcaggagttcaagaccagcctgggcaacatggtgaaaccccaggcaacatggtaaaaccctgtctctactaaaaatacaaatattagccaagcgtgatagcaggcgcctgtaatctcagctactcgggaggctgaggcagaagaattgcttgaacctgggaagtggaggttgcagtgagccaagattgcaccactgcactccagcctgggcaacagagcaagactctgtctcaaaaaaaaaaaaaaatgctgaggaggtgactgtcccacctccatcctccgagttgaccatcacaatttagggaggggaatgacctacaaaggacccagaagcaagcctttcaattgttgagcttttgccattatgggccatcgtttacaacatgctgtttctaggttctctggaggtaaaattagcctcctcttttaaacaaagctaatctgcaaaagcgaaccaaaaattcttttccaccagagatcaattagcagaatgagctgggtgcgatggctcacacctgtaatcccagcacttggggaggccgaggcaggtggatcacttgaggtcaggggtccaagaccagcatggccaacatggtgaaaccccatctctactaaaaatacaaaaactagctgggtgtggtggggagggcctgtagtcccagctactcgggagggtgaggcaggagaattgcttgaacccaggaggtgaaggttgcagtgagccaagattgtgccactgcactccagcctgggtgacggagcaagactccatctcaaaaaaaaaaaaaaaaaaaaaaaacagcagaatgattcttttggggagttgactttttttttaatttctgagttttctttttaaatatcaagttatacaagggcattcaaattggcctacaactcacaggaatttggcagcctgtttgcagagtcaagcttttacattgttctcatgaaattggtacaggcataaagccacccttcactcttgaaaatccattttgaatgttgttgttttaattcttatgcaagaaaaggatctggatagggatttcaggccatcctgtcaaccctggcaggcttgtagatcatgcaggaactgggaggtgtgagattttgccagtaggatcctggcaagtgcctgggactctcccagggttttggaagagccgacggacatgagtccaacagggagcatctttatatcatggccgaagggatgagagaggagaccctcaaacctcacgcctaccacaccctccccaccccactgtcaagagtccatctggtactgctgttcctcccccagggcagggctgcaggcccagcacagctggccaggtgccttgatcaagccattcctgcacacctaagagccaaactgctagaaaaccagaataggagctactgcttttttccctaaaaagttttggaatcttctccccgttacaggtttctggcctcttttgcctgagaaggtctctcaccctatgaggactttgcttattgtctttccttgttatcggatagttggcacattggaaggagcatggatgctctgaggttctcagcctgagcgctgaactctccacccgccccccaccccccaccccagggtcctctgcttatttcctttctggtcttttaacttgctttgtctgtcctctgtgcatatcccctcatagacaaggctgagagccccacaagtattagattgaccttattgttttaagaaattgtccctccaggtctgtttgatttctctctagatgtgcaagtcctttagcctctctgtgcctcagtttttcccatctagatgaggaaactgcggcccagagggactgtggagggaagtaagtccgacaagatcactgaggttgggttcagctgtcagatgctacccatctcccagccctgaatacggaggctcacagtgagcagaatgatgctcagcagcctggccagcctgggttctttgaggcctggcagggctgcgagatccaggggaagggaataggggaagggagcataaggttattcccttccttgttgaaaggaaccttgccattctggcctgttggggtcaaagcaaggattcttcccccagtgctgtgattgtggcctcgtctccgatatgggagaaaactatccctgtggtcccaccaagggatgtattgaagctcttctgaagatgtccacccctcctgcacctcacccaaatatctgtgtgtgtgtgtcctgctcaattcactgactgtgtcccttgtatccatgcgtctaccataaacaccccatttcatgagccatcacacgtggtatcacgctctgtgcccatgcatcagggcggccaactgacatttctcagcagctggcagatcatgatcctgccctcaccgccaagagtccatctggcgcggctgttcttcccccaaaggcaggaccgcaactggcagagcgccttgatcaagctgctcctgcatacccaggagccaaactgtcaggaagccaaagatggagccctcaggctgctatctcttgatcctcatcttcaaaacagcccccacccctgaaggcattatttttcttgtgtatgatgaaatggaaagaagattagagtgcgagatacccacacctgggtttgaatcttagtctgtcttcccagctgtgtgcctgcccttgggcaggtcactctttttctctaggcctcagcttcctcatctggaaaatggtcataatggtgctgtcttcccataggcaaatgcagtgatgtccagaagactcccatattaaacctaaagtcagcagattaggcaaaaatcactgtcattgaaaactccctcaatcatccgtaaagaagctgggtgtggtgtctctcacctgtagtcccagctacttgggaggctgaggtgggagaatcacttgagccagggagttcaaggctgcggtaagctatgattgtgctactgcactccagcctgggcgacagagcaagaccacgtctctaaaaatataaaataaagccgggtgcggtggcttacgcctgtaatcccagcactttggaaggctgaggcagcctggcaacagagtgagaatccatcaaaaaaaaaaaaaaaaaaaaaaaaagtagaatctatatgattctacgtatgcaataattcctagatacactgaatttgagaaccccaagtcagactacaggaaaaggagatgagggggtgtggaggagaatccacttggaatatttgtagacatttaaaccattctgtgttttaaaaaatatcacagccgggcgcggtggctcacacctgtaatcctagcactttgggaggccaaggtgggcggatcacgaggtcaagagatggagaccatcctggctaacacggtgaaaccccatctctactaaaaatacaaaaaaaattagctgggcgtggtggtgggcgcctgtagtcccagcactcgggaggctgaggaaggagaatggcgtgaacctgggaggcggagcttgcagtgagccgagatcttgccactgcactccagcctgggcgacagagcgagactccgtttcaaaaaaaaaaaaaaaaatcactaacttccagaggggtcgtggatggaaaattccatagagtccgcttggcgacagggtttccgccattctgatggcggtcaagtctttctaacctggatctccagtcattgttgaaggcgcctaatgagccccaagcctgattccaatgaatcacgagaggaccagctgctaggtgctgatagctttccccaggcccgcatttgctcagagggcttcagagttgcttctaattccatcccaagtcagaactctttgctgaccccctccttcataaagagcaaagccaaggccatagcttttgttaatcaaacatcagaattccacagacctgagttggttggttgtttgttttaagagacagagtcttgcccaggatgcagtggctcacacttgtaatcccagcgctctgggaggcctaggcaggaggatcacttgagcccaggagtttgagaccagcctgagcaacataatgagacccccgtctctacaaaaaatggaaaaatttgcctgtatttccagctacttgggaggctaaggtgggagaatcacctgagccctggaggttgaggctacagtgagccaagatcccgctactgcactgcagcctgggcaacagagggagaccctgcctcaaaaaaaaaggagagaaggagagagacagggtctccctatgttgtccaggctggtctcgaacttctggcctcaagcaatcttcccaactcgtcctcccaaggtgctgggattatagctgtgagccacggcacccagtctgggcctgttttgcagatgaggataacgagaggcagagtcaggattcaaacccaggtcccctcaacttcaaagctcacaaccttttagacattctaaaaccttgcagctccacaacgcctggagaagaggggtttctccggctcttggcagtgactttccgtggtgaattcacctttggtaactgacagctttgcagctgtcctgctacctggaaatttggctttcttagtgctttcttgggcagtgccaggtgcctgccaagggcgggggactgaatggaggtgggggcggcttccagatggaaggatggacatcggccagcgccatgagcctgaggctcccccaactgctgcccgggcgggactcgggggtgctcaggggtgcgtgtgtgtacgtgcgtgttctgtgttcttttttctgaggccacttacgatctgtctctccctccgatgccacatcaccaggagcagtacacggtaaagtctctctctatctttctctctctctctctttctctctctctctctctcatattctgtctctcgtgatctgtcccctggtgcagcctcgttagttctgggcctgtttctgtggccttgtgtccttgctgccgctgtcctgtcgcttcaaatgaccagaactcactccctgcgaaggaggcatcccaaagggtcttgccaatgcctccgcccatgccccaccagttcttgcagagaacagaaggggcagaggttcagtttcaataggcaagctgggtggagcagttatcagaagcaatgaaagtgggccagacacggtggctcacgcctctaatcccagcattttgggaggccgaggcgggtagatcacttgaggtcaggagtttcagaccagcctggtcaacatggtgaaaccccatctctactaaaaatgcaaaaaattatctgggcttggtggtgcacacctgtaatcccagctacataggaagctgaggcaggagaatcacttaaacctgggaggtggaggttgcagtgagctgagattgcaccactgcactccaccctgggtgacagagtgagactctgtctcaaaaaaatatataaaataaattgaacaataaaaaaataaaatggccatggaatcgttttcagatgaggagatgcagaatgcccatggagacatgctcccaattgtcacttgtttgggacatcaagattttagccagttccatgtgcaacctggatgtacagttccttgactttttttctatcaacatgtattctaaagttcaatttcaaaaggaaactttagccaggtgcagtggtgcatgcctgcagtcccagccatttgggaggctgagactgaaggatcacttgagcccaggagttggaggctgcggtgagctatgatcgtgccactgcactcccccctgagattccatctctttaatttaaataaaaaaaaaggaaactatattatccacttacaaccagcattgctaacctaagataaatctgcaactgcaaaagtaaatgtaggccagacatggtggctcacacctataatcccagcactttgggaggccgaggcaggtggatcacttgaggtcgggagttcgagaccagcctgaccaacatggagaaaccccgtctctactaaaaatacaaaattagccggacgtgatggcacatgcctgtaatcccagctactcgggaggctgaggcaaaagaatttcttgaacccgggaggcagagactgctgtgagctgagatcacgccattcactccagcctgggtaacaagagagaaatgccatctcaaaaaaaaaaaaaaaaagtaaatctaacagaaaccagacaatgttgttgccttcaagctgggctctttgttaaaaggaaaattactaagtgttagggaggtgttaaaggcctattagcatctacctgaggcttcctttctcgcaaaagcagagcgtctgaaagatacgtggaaaagaaacttaaagtataataaaaaagaaagaaagaaaaagaaatgattatgcccctctgagatccaattatttaatctgtgcccctgttctgcctaaaattatctcagtgactgtccaacgtgtgtctcacacttgggggcacagccttgagatgataatgatgatgttagttttaaaaagaaaaaaaaaggttcagagttctgaatcctggagtatatctctgcctagcaggctaaaatacaattatcgtctttgttccctgaaaaatgaaaaaaatggagtcctttaaaaagcaaatggtgtgaagaatgatgtttttgcactggatactgagacccatcgtgatgggggtctctggggcagctctgctcatgacctgggaggtcactgtagggagatgttttctaggtgacctccccacccaaatactccaaccggaggcattcacgtgtcctgagaccacacgccaggcgcaggctaggggctaggacaagaatcaagattaaaggggaaatggccaggtgcggtggctcatgcctgtaatcccagcactttgggagtcaaggccagtggattacttgaggtcgggagttcgagaccagcctggccaacacggtgaaaccctgtctctactgaaaatacaaaaattagccaggtgtggtgactcatgcctgtagtcccagctattcgggaggctgaggtgggagaatcacttgaacccaggaggcagaggttgcagtaagccaagatcatgccactgcactccagcctgggcaatagagcaagactccatctcaaaaaaaaaaaaaaagattaaagggaaaatgaacacagagaagagtagattacactgtaagcctttgaagagttttctgtctaaaaccagagaccgaagaaacaaacaaagattaactccgaaatagcacataggagctggcaggagccagaggtaggcagtcaggaaatgctgtcggagggagcaacaggtaatttgggctttgaggaccgggtagttctgtgactggagaagtggaggaagggcatttctagcagcgggaacagtatatgcataagcagacagaggcaaaagaatgtggctggggcttgagatatgtagccataaatgggaatgcaaaggtgaaggtaagttggactagattttcaagagcattgaatgccatgcccagaagtttgcacttgctcttctgagaattcacgtgctccagaagaattctgagcaagagaaagagtgacaaggtcattggctttagccactgtgtgcataaaacatggaagaaaaggcagggaatgaggagcaagttgggagacgggtgaggggggatggcacccaggaatggatggcgggatgttaaggaaggtgacccactggggatggggatggggatagagggcaggcagttgaccatgactctcaggtttctggtgtggacaactggatgggtcatgagtgccatgaaccacaagctattcatggtcccactcaataccctcctcttggggggcctgagtcatggttggccaagggtgtcatggcatctctggggtctgcattgctaagctcagttccaacagaccttggactgaacttctgtgcagtcctctctggcaaagatgggctcagagacccttggagcaatgcagcagagaccatggcagcagccacatcagcatctgaaaacagcggcacccggttattttccctccttcagactcagggaatatggtgggggaggggagatttggtataagggccactttaagtatcttccagaatcccattggaagggggagaaaatcccatttttttaagagcccactgataccacctttaaaaagaatacacagggggccaggcgcagtggctcacacctgtaatcccaacactttgggaggccaaggtgggtggatcacctgaggtcaggagttcaagaccagcctggccaacatggtgaagccccatctctactaaaaatacaaaagttagctgggcatggtggcacgcacctgtagtcccagctacttggagaggctgaggcaagagaatcacttgaacctgggaggtggaggttgcagtgagccaagatcataccattgcactccagcctgggcaacaagagtgaaactccatctcaaaaaaaaaaaagaatacataggggaccactaaactcctagaccaagggcttttttgaaaatagctgtgaccaggtgtagtggctcacacctgtaatcccagcactttgagagggtgaggagggcagattgcttgagctcaggagtttgaaaccagcctgggcaacatggtgaaacctcatctctacaaaaagacaaaacaattagccaggcgcagtggcgtgtgcctgtagtcccagctacttgggaggctgaggtgggaggatggctttagcccaggaggcggaggttgcagtgagccgagatcgtgccactgcactccagccttggtgacagagccagaccctgtctcaaaaaagaaaaaagaaaagctgtgcagaaatgggggtggggaatcagccaacccccttgtgctgggtctcagggacacccaatacagctgctcaggcccagccagatggcaaagggccctcaaccaaccctgggaccagaaccacaaaaagccacgtacttactggctcccgagcccaagcttaacaggtgaaatggaccactcttcaccaggaagggcagggctgtgccaagctcaccccagacttctaggcctgggagggtagggtcccatggagctgtgggctgccccctacccaacctgacctctgcttcctctcttcccttcttcccacctaaacattcctccacagtggcaatagcaaaggaaaagacatcaacacgattaaatccctccgagtcctccgggtgctacgacctcttaaaaccatcaagcggctgccaaagctcaaggtgagattgggagatggtggggtgcggtgggggggactgtcagggttatcatgtacagctgagcaggttgtacactgctcaaggacaacacattaaaggaggtgctgataacatcctagccatcgtgtatggatatttgtattattacaacttcccagcagatggcagtaaagtgagctgacctaaaataatctgtgtattatggcagtttttctttagatgaagtgtcttggggttaagatcctttttcctaattcgcatgaaggcatcatatggatttaaaagggtataaccgtgatctgggaagcaggaactagatttcttgttccataaaattttgacttttcatctacctattctaggctctagtatctcccattccaaaatagcatgaaccagcatttcccaaaagcctgtcattcaaaaacatatatatatattaagggaaataaaatccagtcattagagcacccactttcactctatgcttcacctgggggtccccagtattatctcttatgtaatatgtttctttaaatcaagtcacacccgtaatccctgcattttgaaagaccaaggcaggagtgttgcttgagcccaggagaatgagaccagcctgggcaacatagttagactctgtctctactaaaaattaaagacagaaaacagatactgttatggaaatctaaccaaatatggctgcctgcctaaggctttgtgcattgacaactgctctttcttggttaaagagggaaaatgtcaatggtaggtgttaacatggtagcaactaagtaaaaatttctccttcactcaaaaggattgagagagttggaaaggaagtaactttgttaccttgtttttctgtgttgggctcctgtatcacttaaaagcatctctggtatcccatctgggagttttagatccatagaatgccaggattgagtccaactcctccaacgcttatttctgaaagctggggggaccttaccctagtgacttgacttatgaccttgcctgtaaaatgggaatgatcatggcagtattttggtatgatgggccactggaggcagaaggttgggcaggtccccagcccctcatgctctctgtcaactccaccccacaggctgtgtttgactgtgtggtgaactcacttaaaaacgtcttcaacatcctcatcgtctacatgctattcatgttcatcttcgccgtggtggctgtgcagctcttcaaggggaaattcttccactgcactgacgagtccaaagagtttgagaaagattgtcggtgggtctccactttccagcacattcccattggaaccagcaggtgggcaggggggaagtggctagaggcattggccacttgggctcagagactggagaagtgatgagccttggaagtgactcagttgcaaccagcttggatcttgggtagaaagaaaaccggttttagaatttgagtcaccacccagagccacagaatgagtcataagcaaattgattgacctttcagccaccgcctttgtcatgtgagggatattaatacacatccacagttccttacttgaaatcgttacaggcagatgtgtttcaaagttgagaatattttgagattcccatgtgggacatgacaccctcagctgggtctaaggcagccctataatcaaacacaatatttctgccataaaatgtgtaactatttacatcaaatggggtaaataacaagtataaagagcttcatgtccaatcagatcaggtttcattaccaaataagttaggtaagaggccaggtgcagtggctcacacctgtaattccaacactttgggaggctgaggtgggaggatcacttgaggccaggagttggagaccaggttgggcaacataatgagagcccatcctacaaaataaattttaaaagttagcggggcatggtagcacacacctgtagtcccagctacccgggaggctgaggcgggaggattgtttaaacacaggagttcaaggctgcaatgcactatgatggtaccactgcactccagcctgcgtgacagagtgagaccctgcctctcaaaaatatatacatataggccgggcgcagtggctcatgcttataatctcagcactttaggaggccgaggcgggcggatcatgaggtcaggagatcgagaccatcctggctaacacggtgaaaccctgtctctactaaaaatacaaaaacctagctgggcatggtggcagacgcctgtagtcccagctacttgggaggctgagacaggagaatggcgtgaacccgggaggcggagcttgcagtgagcccagattgggccactgtactccagtctgggcaacagagccagactccatctcaaacaaacaaacaaacaaacaacaacaacaaaaatatatatatatatatatgtatatatatatatgtacacgcacacacacatatgtattatatgtgtgtgtgtatatatatgtatgtgtatatatagtgatattgttaccagtgtaaagtggcattttgcaacacatggtagcctgttgttatcttgatggctatttattgaaattaggaggatgccagatgtctggataggagtctggaactaacccttgtttcctgccttgaaaaggagtagcaacctcccttagcctgatgaacctctaaatgtcccctatgtctctctgcctcctcctaaactccctccaccccacccccagcaagcctgaggctctcaccctgaggactagaagttatcacgttggaagagggtgctggaccctgggtcagctctcccaccaggagtaaggttgtgccatcacccatggatttatctcaaagtagatgcacacgtcatcccctatgaagcacaggaacacatggtggcaggatggggagtcactgcttcccaagcagtctaggctggtggaccactcttcctttccctccccctgtctctgataaccaaagacaagtgcaagacagcccctctttcccatttactaacagtccccactctctgtggcagaggcaaatacctcctctacgagaagaatgaggtgaaggcgcgagaccgggagtggaagaagtatgaattccattacgacaatgtgctgtgggctctgctgaccctcttcaccgtgtccacgggagaaggctggccacagtaagtggcccgactggaaatctatccaggaggagccctggggagcaggaggataaagggcctgagagcttagcaataagaaaggtcttggaggccgggcatggtggctcacgcctgtaatcccaacactttaggaggccaaggcagatgtatcacttgaggccaggagtttgagatcagcctggccatcatggcaaaactccatttctactaaaaatcccaaaaaaaaaaaaaaaaaaaaaaaaaaaaaagctgccaggcatggtggctcacacctgtggtcccggctactcaggaggctgagacacgagaatcacttgaacccaggaggcagaggttgcagtgagccgagattgcaccactgcacttcatcctgagtgacagagcaagactatggcctccccgccttcaaaaaaaaaaaaaagtgaggctgaatcatggacttagtctttatttaaaattttgagccacttgtggtggctcatacctgttatcccagctactcaggaggctgaggtgggaggatcgcttgagcccaagagttcaaggctgcagtgagctgtgattatgccattgtactccagcctagacaacagaaggagacccctatccctgaaaaaaaaaaagaagaagaaattgatatttgttcatcatggactttttgcattaattttgattttttaaaatattggagcaaaagattatcttgattactgagattttcagtacccccttaatttgcacccaaaacaaatgcctccctccctcacctcgtccaagtaatggtctttctctcagaggtcttggaaatgccaggctggaagcttggtagattccagcatgtgccctcagcatcctcacctccctccctctctcagcaaatatgccaacctgaacatgccctactacccactctcagacacatccagtactcacacatgtgggaataatgctaacccacaaggcacctttgagcaaagtttttttaaacacctttctcaacagacttcatttccatctgtctgaaaatcatcgcaatagacttaaatgattttgttcaaacaaggcactgaaggaccacctgccaaaaaattgtcatcatgaatacacaaatctatcatgcctatcatgtgaaggtatcgcttagacacagagcctttgagcagtgtgcaacctgcactactgtacagagctgctgtgcacttacccactctcatatatatccccattgtacctcctgagcacccagcaccacctgtgctcaaatacccactctacatgcatacacccacctctactccctccattgccacaacctgtctttaaatcccaacttggccacttataagtgggtggtcttcagcacgtccctttaaattgctgaacctcaagttcctcatgtgcaaagtggagccagtaataacctccctgggagggttgctgagccggtggggatgaattgttgaatattgtttccagcacacagcaagcccttcatgcacagcagtagaaatgactgacattggccaggcgtggtggctcacacctgtaatctcaacagtttgggagaccgaggcaggtggatcacctgaggtcaggagttcaagaccagcctggccaacatggtgaaaccccgtctctactaaaaatacaaaaaaattagccaggcttggtggcgcatgtctgtaatcccagctacttgggaggctgaggcaggagaatcatttgaacccgggaggcggaggttgtagtgacccaagatcacgccgttgcactccagcctgggcaacgagagcgaaactccatctcaaaaaattaaaattaaaattaagaaataactgacattgttgtcagcctttcaaaaaacagcgactacttaaatttctttttcatttccctctgttcctgttctgccatctcacttccaccctctctccaccttcctcatcaccccttgggtccctgtctctctccttcctgccccttccctctccctgccccattccttgcagggtcctcaagcattcggtggacgccacctttgagaaccagggccccagccccgggtaccgcatggagatgtccattttctacgtcgtctactttgtggtgttccccttcttctttgtcaatatctttgtggccttgatcatcatcaccttccaggagcaaggggacaagatgatggaggaatacagcctggagaaaaatgaggtgccacttccaattccatctgtcctttaaaaactggggacacacacaaactttaaaacacacacaacacccaggaacccctttctaggggtacctgggggagggaacagaagcattgtcccaaccgaatccagtcttcagggcagcccttcatggagtttccagaggaaacacatcatatagtgtatgtatcagtcagtttagactaggttatgccgcagtaacaagcaaccccagatttcattgccaaatatccacaaagggacttattttttgctcacactgcatgtcaacatcagttgtggatcttgccatctttattctggttcccaggctggcagagcagcagagcagcctccctctgagatgctccagatgaaaaagagagtatgtcagactgaggttcagttcttcaggcttgtgctcaaaaattacacatgtcacttctgctcacatttcatcagccaaagcaagtcacacatccattctgacatcagtggagtgggcaaatacaatctcccctagcgaagggtggtgaatatttatgaatgaaaagccaagccaggtgtggtggctcacacctgtaatcccaacattttgggaagctgaggcaggaggatcacttgagctcaggagtttgagaccagcctggccaacatagcaagaccccatctctactacaaatcaaaaaaattagccaggcaggatggtgcacacctttagccccagtaacatgggaggctgaggtgggaggatgcttgagcttgggagttcgaggctgcagtgagctatcattatgccactgcactacagcctgggcaacagagcaagaccctctctcaaaaaaagaaaaggaaagaaaatccagtcccctgtctaccagagagtatagacatgactctttgcctctctggcatcatccaagctaaatagaggacctagaatatatcctctgctcccttgacccttaagacttaataaccactattcctccttctctctccctcaaagagaaggagaagacgcagcaaagtattcagtaagaaagaatgggctgggcgcagtggctcacgcctgtaatcttaacactttaggaggccaaggcaggaggattgcttgagcccggaagttcaagaccagcctgagcaacatagtgagaccccatctctatgattaaaaaaaaaaagttttaattagctgggtgtggtggtgcacgcctgtagtcccagctactcaggaggctgaagcgggaggatcacttgagtccaggaggtcaaggctgcagtgagctgtgattgcactgcactccagcctgggtgacaaagcaagcccgtgtcaaagaaaaaaaaaaaaaaaggaaggagggagggagggagggaaggaaggaaatgagagagagaaagaaaggagggagggaaggaaggagatagggaagaaggaatgaagaagaaagaaagggagcgaaggaaagaaggaagaagagagaaaggaaaggagaaaggggaaagggtggaaggaatgaagggaaggaaggaaaaaggaaagtgaaggagggagggaggaaggaaggaaaggagggagggaaggagggagggaaggagggagggagggaaggagggagggagagaaggagggagggagggaaggaaggagggaggaaggaaggaaggagggagggagcgagggagggaggaaggggaagaaggattaggcttcaatttgatttggcacactcggtagctgtgtcacctcaggcaagtggtttaacctttctaagcctctattttggtgatctgcaaagtgaggccattgatagtacccacttcccatgtttgtattagccatgcaataatggggaaatgtcagtgcaagttttggcagttggtgacatctcaagcaactgtagctgttgggataagaaagcaatggtgagaaggaagagagagcccaggaatcctggctgggggcaagagaggcagagactcaagcagaagcacttgagaaccgcgacgagttagacagagggtgcccggtgtacagccaccttcctcctgcctctgccgctctcaccactggcctctctcccgcagagggcctgcattgatttcgccatcagcgccaagccgctgacccgacacatgccgcagaacaagcagagcttccagtaccgcatgtggcagttcgtggtgtctccgcctttcgagtacacgatcatggccatgatcgccctcaacaccatcgtgcttatgatgaaggtaagtgccccacaccagcccccagcactacttaacccccacctcgttcctgcctctaccctgataaaatgaaaccatctgcagtttcccagacagaccacactctggatcacctctgagattttgttcctgctgttccctctacctgacacactgttcccaccactcccccggccagcttcttcttcccagctgtacctgcagacctcttcctccagaaagccttccctgaccacccaagactgcttgaggtgcccatcttagcaggcatcctatctttatgtcgcctgccacaaaaatctgcgtcaggttgcatgacagtgtcccccacccatttatgatgacctcagccctgaattcctagaggccaacaaggatctggctcagacggaacaagaagctctctataaatgtttgattaatgaaatgagggggctgggcgcggtggctcatgcctgtaatcccagaactttgggaggccgaggcgggcggatcacctgaggtcacgagttcgagaccagcctgaccaacacggagaaaccgcatctctactaaaaatacaaaattagccaggcgtggtggtgcgcatctgtaatcccagctactcgggaggctgaggcaggagaattgcttgaacccgggaggcggaggttgccatgagccgagatagcgcaattgcactctagcctgggcaacaagagcaagactccatctcaaaaaaaaaaagaaaagaaaaagaaagaaatgagggagaaggggtaggtgaggaccctaaaatccccagggctaaggagcggcttccaaaaaaaaactctgaaaacctttcaccctgtgctttggactccaaagcgtggattcaagcccagctcttccatttaattcatttacctttgtacaagcaaccagtgactttctggggactcagtttccctgtcaataaaatgggaatgataataagagcacatttgccccctccagaggaggtgagaggattgaatgagaaagttcatgcaaggaccttagctccttctcggcacttcaaaaacgatcaatagtggccgggcaaggtggctcacacctgtaatcccagcactttgggaggtcgaggcaggcggatcacttgaggccaggtgttcgggaccaactggccaacatggtgaaatcccgtctctactaaaaatacaaaaattagctgggcgtggtggcgcatgcctataataccagctgcgtgagaggctgaggcatgagaatcgcttgaacccagggggcggaagttgcagtgagctgagatcacaccactgcactccagcctgggtaacagagtgagactccgtctcaaaaaaaataaggaagccggggacggtggctcacgcctgtaatcccagcactttgggaggccgaggagggcgatcacaaggttaggagatcaagaccatcctggctaacacggtgaaacgctgtctctactaaaaatacaaaaagttagctgggcatggtggtgggcacctgtagtcccagctacttgggaggctgaggcaggggaatggcatgaacccaggaggtggagcttgcagtgagccgagatcgcgccactgcactccagcccgggtgacagagtgagactcctcaaaaaaaaaaaaaaaaaaaaagtataattcagccaagcacaatggcgtatgcctatagtcccgactatcaggaggctaaggtaggattgtgagttcaagcccagcctgggcaaaataggaagaccccgtctaccaaaaaaaaaaaaaaaaggttgggggaggtttttgtttttttggatgtgaaaagaagagcctagtccggcggagagcggggctttcctgaactgtgcctcctaccagtgaggttgctcagaccttgcctggggctggagtgttgcctggagaacagccatgaagctgcctccccacttcccacttcccacccctgctcgctgacccctgctactcctgcttctttcccctagttctatggggcttctgttgcttatgaaaatgccctgcgggtgttcaacatcgtcttcacctccctcttctctctggaatgtgtgctgaaagtcatggcttttgggattctggtaagtaccaccttggggctacagctatgggcttgggagaagcccaagggggaacaatgggtcctggatgatggtctcccaacgtggccccaagaaccccaacctcaagggtggcttcagtatcctgccagtggccacagatcctacttaggcattcttgtgtttgccaaggagtcccagggagacccaacctgtgagtgttaccatatggctgcttatgtatccagttcctcaaaatgatgggagtcatcatggctgggagtctttagcatccattttagagataagaaaactgaaatcaggctgggcgaggtgtctcatggctgtaattccagcactttgggaggccaaggtgggcggatcacctgaggtcgggagttcgagaccagcctgaccaacatggagaaactctgtctctactaaaaatacaaaattagccgggtgtggtggcgcatgcctgtaatcccagctactcgggaggctgaggcaggagaatcgcttgaacctgggaggcagaggttgtggtgagccgagatcacatcactgcactccagcctgggcaacaagagtgaaactctgtctcaaaaaaaagaaagaaagaaagaaaactgaaatcaggctgagcacagtggctcatgcctgtaatcctagcacttcaggaggccaaggcaggaggatcgcttgaagctaggagttctcaaccagcctgggcagcaaagcaagcccctgtccctacaaaaaaaaaaaaaatttttttttaattagccaggcatggtaactcgtgcctgtagtgccagttactcaggaggctgaggtgggaagatattttgagcccaggaggtggaggttgcagtgagctatgatcatgccactgcaccccagcctgggcaacagcaagactccatctttaaaaaacaaacacagaggtcaggcacagtgactcacacctgtaatcccagcactttgggaggcagaggcaggcaaatcacttgagcctaggagttcgagaccaccctggccaacatggcaaaaccccatctctactaaaactacaaaaaattagcctggcgtgcttgtgggtgcccatgatcccagctactcaggaggctgaggcaggagaatcgcttgaacccacaaagtggaggttacagtgagctgagatcacaccactgcactccagcctgagcaacagagcaagtctcaaaaaaataataataataaaaataaatatgtctttatttttcaccagccactaactaaattttaacatttccttccatcttaaagggagataacaaacccttagtattagtattatcaacccttaatattatcaacatgacctgtgtcacttataaacatcagatattttcatactgcattataagagctgcagataccttaacatttaatttgcattcatcattgctttaaaatgttgcttgtgattaaacctacagctagaatttgttactcagtgtttttttgttgttgttctgttttgttttgtttgagacagtctcgctgttgcccaggctggagtgcagtggcgcaatctcggctcactgaaagctccaccccctgggttcacgccattctcctgcctcagcctcccgagtagctgggactacaggtgcctgccaccacacctggctaattgtttgtatttttagtagagatggggtttcaccatgttggccaggatggtcttgatttcctgacctcatgatccgcccgcctcggcctcccaaagtgctgggattacaggcgggagccaccgcacccggcctactcagtgtgttaatggagaagtatattcattgttagatcgccatttttaaaactttttttttttttttgagacacagtcttgctctgttgcccaagctggagtaccgtggcacaatcttggctcactgaaacctccacctcctgggttcaagcgattctcccatctcagccttctgagtagctgggactacagatgcacaccagcatgccaggctaatttttatatttttagtagagacggggtttcaccatgttggccaggctggtctcgaactcctggcatcaagcaatctgcctgcttcagcctcccaaaatgctgggattacaggcatgagacactgtgcctagccttaaaaaatattttgatagctattttattacaaaaggtaaccttgaagcccttgctattttgttatgcatttacaagcctttatgcataaaataaaatagccagcactattctcacatggccaaggttcatagcacacacacaaaagtatagttggctgagtgcggtggctcacacctgtaatcccaacactttgggagacagaggtgggtggatcatgaggtcaagagatccagaccacccttgccaacatggtgaaaccccatctctactaaaaagtacaaaaattagctgggtgtggtggcgcatgcctgtagtctcagctactcgggaggctgaggcaggagaatcatttgaacgtgggaggcggaggttgcagtgagccgagatcttgccactgcactccagcctgggtgacagagtgagactccatctcaataaataaataaattaaattaaattaaattaaaattattttttaaaaaattgggggctgagtgtgatggctcacacctgtaatcccggcagtttgggagcttgaggagggcagatcccttgaggtcaggagttcaagaccagcctggacaacatggtgaaaccccgtctctactaaaaatacaaaaattagccaggcatggtggcgtgtgcctgtaatcccagctactcgtgaggctgaggcccaagcatcgcttgaacctgtgaggcggaggttgcagtgagccaagatggcaccagtgcactccagcctgggtgacagagtgagactttgtctcaaaaaaaaaaaaaaattaaggtgaagaaggcttatactagtgggctgggacttgaagtgaagtgaattcttgaaggtccccagtgagtggccaaggtgggacttgaaccaggacatctgttctcttgaccaccagcttagtccatccctttgaagagagtgacctacagtctgggtctcagccagggtctcaggaaaccaggttcccaccttggctcacggaggtggttaggggcatcagctttagcaccagagttcagatcttgcctcgtcctatataagctttgtcacctccccatcattaaaaggagccatcctccccctccacctcagcagagccctggtaaacagcaaatggactaacgtgcatctagagggttgaggatgaagcctggcctggcatgggcactcaataaatgctaggggccaggcacggtggctgacacctgtaatcgcagcactttgggaggctgaggcaggtggatcgcttgagcccaggagtctgagaccaacctggacaacatagtgagattctgtctctacaaaaagtacaaaattagcctggtgtggtggcgtgcacctgcagtcccatctacttaggaggctgaggtgagaggatggattcagcccaggatgtcagggctgcagtgagtcgtgattgagccgctgcaccccaccctgggtgacagagcaagaccctgtatcaaaataaataaataaatgctaggaaagggatcctactaatggacctttttcctccaaaacagtggctttcatttggtggagatgctacttattagaagcacttgaggccaggtgtggtggctcatgcctgtagtcccagcactttgggacttctgccaaggcagaagaattgcttgaacccaggcgtttcagaccagcctgggcaacatagcaagacctcatctctagaaaacattgaaaaattagccagcatagtggcacatgactgttgtcctaactacttaggcgaaggcaggaggattacttgagctcaggagttcaaggctgcagtgagctgcgatcacatcactgccctccagcctgagcaacaacacaagacccggactctaaaaatcaaaaaagaagcacttagggaaatttcttaaaattaaatgataccctgagcaaacccctagatgttctgattcatttggtttggtgaggtgggagggaatcactgaatctgtaatttattattatttttttttttttgagatggattctcactctgttgcccaggctggagtgcagtggtgcaatcttggctcactgcaacctctgcttcccgggttcaagcaattgtcctgcctcagcctcccgactagttgggattacaggcgcccaccatcacgcccggctaatttttgtatttttagcagagacggggattcaccacgtcagccaggttggtctccaactcctgacctcaggtgatccgcctgcctcggcctcccaaagtgctgggattataggcatgagccaccgtacctagcctgcagttattttattctgagttgatcttctgctggtgaagtgagtcttccactggggcctggagctgcatctccctcaccctgccaatcctgcaagagccagcactgagcttcccctctgctttctcttttttttttttttttttttttttgagatgggatcttactctgttgcccagcctgttcttgaactcgtggcctcaagcagttctccctccttggcctcccaaagtgctggaattataggcatgagccaccacgcctggtctcccctttcagttttaaatgaagccacaagttccctgtataacatttgggagatagaggggagctctctagcctaggggttgaggtctgtgaccaaacgcctataaagttgtctttgtttggactcccccagaagcagagcctgagacaaggattgagtgcaaggaatttatctgggatgcagggcagtaagggagagaggaagtgacacagggacagaaaggcaaccaggaaagagtgtattattaagccagttcctgctgtgaacaaatggggctcagtttcagtggatacctccaggaggcaacagagagcacataccacagagtcatcccacctcacagggagggaattggagtatttatcctccagtgcccatcagacataatcacaggccactcccaggggagctattaattccctaacacttgtgcagccacagagagaccctgggcaaagtagtgtacctcaggtgtgtagttgagctatgggcagggccccagcaacacctgccaaaatgccaaaagtgccagtgggacctgaattcctttttatttatttatttatttatttatttatttttatttatttatttttgacggagtctcgctctgtggcccaggctggagtgcagtggtgcaatctctgctcactgcaagctctgcctcccaggttcacgccattctcctgcctcagcctccggagtagctgggactacaggcgcgcaccaccacgcctgcctgatttttgtgtgcgtgtatttttagtagagatggggattcaccatgttatccaggatggtcttgatctcctgacctcgtgatccgcccacatcggcctcccaaagtgctgggattgcaggcgtgagccaccgcgcccggccccctgaattccttttttaggcagttgtgaaacaacaacatcccatctgttgggcacctactgtatattccatgctcagcgacgcacattcattgtctgattgctgtgttaccactgccttccagagaagggcgcagaggccccaggcacttcgcctaggagggaagcacagctctaaggtcaggctccttctctgtaaggtagaggggctacttcagggtcacactgaccgccccaacccctgacctggcctctgcttctgcgaagatgctgagaaggccctgtgttttgtgttttgggtcccactgaccccagaggggagggccatctctttgacccagactcttggatccaaactggggtgccacccatcaccatgtcagtacccggttgaggggagtcagagatagcaggagaccttgtgggacttgaggctgtgactgttctccaaacaatgtggagtatttccatattttaacaaaagagaggccaggcgtggtggctcacgcctgtaatcccagcactttgggaggccgaggcggatggatcacaacgtcaggagatcaagatcatcctggctaacatggtgaaaccccgtctctactaaaaaatacaaaaaattagccaggcgtggtggtgggcgcctgtagtcccagctactcaggagactgaagcaggagaatggtgtgaacccgggaggcagagcttgtagtgagccgagaacgtgccactgcactccagcctgggcgacagagtgagactctgtctcaaaaaaaaaaaacaaacagagaggttatgcttgtgtttccccttgagccagcacccagcccaggaatgcagcagtcaggatagatcaagtgaagctgcagtaacaaacagcccccacatctcagtgacttaaattgatgggaagggttttttacattcagcagggaagctgtttgcctcatagttacccagggacccaggctcacagagtagctgccattcaaaatgttactggtcgccaagcccagggttgagaggctagagagtccaacactgaccagaaagtgaccacactgcttccacacacagcacatcactgcacctagacacacatggccccatctaaacacaaggggaccaggaagtgcgtgtgcctgaaaggccccaaagccccgtccagtgcctgttctgcaccctgttactgtccgcctccagatcaggaaatggaggcccagagaggttaagccacttgcccatagccacacagctgtggtagcagagctgggatttgaacccagagtctcctttctttgcgagtatgctgccaacctagtggggacctgaacacagactgtgggctctctgaggcctgggttcaaatcctggctttacatctctgtgctgctagcctcaggcagatgagtggcttggttacctcctagaaaatgggtatacctgggagtggtggctcacgcctataatcccaacactttggaaggccaaagtgagcagatcacttgaggtcagaagttcgagaccagcctgaccaacatggtgaaaccccgtctctactaaaaatacaaaaattagctgggtgtggtggcatgcacctgtggtcctacctacttgggaggctgaggcaggagaatcgcttgaacccaggaggcagaggttacagtgagccgagatcgtgccactgcactccagcctggatgactgagcgagactccatctcaaaaaaaaaaaaaaaaaagagaaagaaagaaaaagaaaatgggtgataacccttccctccaggatcttcatgaggagctcagtgatgtcatttataaagcccctggggtctcgggagccctcaaaaatgctggagagacaggccacagctctgaagagcagccccagccctgtggagctgaagcagggtctggaggccccctctggggccaggccaatcatgggaaggcccccaggagttcccagggagggagactcagcacagatgatgtcgaacagcctttaccgcagcccttcgaacaaccataactgtcccgggcactccgctgatgggcaactgtgcctctaacatgcacccggccagcctagggggccgggaaccaagccctctgttggcatctctgtcttgtgggtccccattctagaattatttccgcgatgcctggaacatcttcgactttgtgactgttctgggcagcatcaccgatatcctcgtgactgagtttggggtaagtctccctccagcttctctctgggtgactctgggctggacgaggcaggcggcagggggcgggggagcggtcccagaggcagtgtgtcccggaagccatagctgcttgagccagcacttggccatgaccagagagggagaactggggccccggggacaagggcagcccctcaggagggcattgtggggagatgggggtaaccaaagcttggctgtagggccagcactgaggggtgggctttcctgcatcctggcctaggaattaataatgcagatgagtacactgagggaactgagacactcaaaagctctgaaagctgagccggctcccaaacaccaccctatgtcaggagcccagaaagaatgggtttcaagtcaattctgtttgaaccaaccctctcctagttagtgggcaggagagagccacagccctcaggccagtgtggggacaccactcccagggccatagaggggtccccagggtgtcttccctcctctagccccgggcctgggagactctcaacatgggagtctctggacctctctgtggtggccccacaggccacattgcccttctccttttctggaagactcagggccccagaggtcctgtcctagaccctctccttggccatctgccaatgagcccaggcttggggtccctcaggagattggggggagggtagaagatccttgcagggggaagcaatggtcaaaaaagggtgtcaaagccaagggtcaagggtgataccaatgtcatcttactaacaataaaaataacaatagctcacgagaatcgcagccttgctgtgtgccagggaactgtgccaagtggtttacgtggattggctcagggtagaggtcttggtctcagctcgtaagagaattccctcggagggttcaactgaaggcacccaaatgcagacctcactggtggaggggaagggaagggtacccacaagggtggcaaggtgtccagcgaccacccaccgtggggagctgtcacctgcccaggtgctgaagtggggagggaacctgagccggaggccaggagaagccaccaagtgggagctgtcctgtcaatgtggagagacagagaccagggcccaagcaggcagagagcaataggggagaaacaccccaacctttctctcccctcatcccttatctcctgccagagcctcccatggcccaaagtaaaccggaagcaagctgaatatgatgctcagagcaggcagggaagtcaggagaatagatctgggtgtggtcgggcctgaggaagagggtgttgcctcatttcacagatgggaaaactgacctcagctgggcacggtggctcatgcctgtaatcccagcactttgggaggccgaagccggcggatcacctgaggccaggagttcaagaccagcctggccaacatggtgaaaccccatctctactgacaatacaaaaaaattagccaggtgtggtggtgcatgcctgtaatcccagctactcgggaggctgaggcaggaaaattgcttgaacccggaaggcggaggttgcagtgagcgacggtcataccattgcactccagcctgggtgacaagagcgaaaactccatctcaaaaaaaaaaagaaagaaagaaaactgatcttcaatgcctggggaagtgagagacactcccaaggtcacaaagccaggcctgggtgactcctgagagtacactgacagctcctggggtgtcccagtcagatccccctacagaaaaggatctgtttgcctgctcttccgtcctagaaggccaggaggggctggggaactacacaaaagagggggccattctttgatatgtcctacggcacccgcacccaagtgatacacacttatttgccttcagctccagtgagccagaattttccccttcccctcaccctatccctgaaaccttcctctagagggttcttgcccacatgggggctctctccactggggtgcccccacctggtcattctcccctgtcctgagtttctagagagggctggagctccagctggcaatcaaaatatcttgccatccggctacatacaagacagccttgaaccaatgtccctttgggtcaagaggttagaaggatggtccagctccccagaagggcaggtggggtggaggaagttagctgaaaccttcaatcaccagtaagagagctgtagggacagactccaacagcctgttctcctggctggcaggaagatggggcatggggtgttcatgggacatcaggacccttgcagtagccaaacagcccccagccctccctaccagctgtttgatcttggacaacttgcgctatctcttctcatgtagagtggggctaaccattgcaaccaacctcagacacttgcaagactcacagtgatgcatgcactcaaaagacattcattgagcacctactgtgtgcctggtgtgattataagtgctggagacagaacgagaaggaggggtgccaaacaaaacagaccaagaatacagagtgtctgctcccatagagctgacattctaaggagagagacgggaactttttacaagtaaaagcatcaacaggccgggcatggtggctcacgcctgtaatctcagcactttgggagaccaaggcaggtggatcacttgaggtcaggagttcgagaccagcctggccaacatggtgaaactctgtccctactaaaaatacaaaaattagccgggcacggtggcaggtgcctgtaatcccagctactcaggaggctgaggcaagagaatcacttgattctcaggaggcgagaggttgtagtaagccaagattgtgccactgccctccagcctgggcgacagagtgaaactctgtctcaaaaagaaaaggaagaaaaagaaagaaagaaacgtgaagtgcttggcacagaacctgccaggaaaccaggagtttgaaaatggtggttgttaactattactgctgttgttattgttattgtgaatgggtgtgtagttttgttagccagccctgagttacagtcaatttgagggaaagatagggggtgggtgtttgggtccttctgggacaattaactcccaacctggagtagggagaggcatgtcctggcaggcaaggaggtctcagttgcccctttctgcctcccaggtaagcccactagttctgaggccagggcttggccaggctgagacaggaaatgccagatgcttgggcgggcaggtccctggggtttagggggcagagggcatgcggcagtactaaccagtgctgtctcagctgctgcccccaagtggctggggtgatgtgggtttgccctgtgtgcaatggataatgactgtgtttcttgtcttgtctcttttcatgcctgctcttaaaactgtatattggcgcaacgccgtctgaaaaactcatccaatcaaaatgcactatgaaattcatttgttcatccatgacatggtctgtgtgttcatacaccaatgacttatctcccaacccaccgccaccaccacccccactccccgcccgggaaccgaaacccattggttttttggcactggttacaaatcaacctaaaaaatgctgaacacgcctccccaactgcccccgcccgcccgctccccctcatcttcaacatctgcatctagaatccggttggtcttacttctttctgaagtctaaatgccttacattaactgtgaacgcatctcctcgcgtcggcattgcatgccacaccctgcctctccaacgtgggatgcctgacgctctcctcaaccctccgctctcctctgtctgtctgtcctcccgcccccagcccctgtgcctcccacttcctgtagactctgtctctctgtttttatcgggttctgaatgggggttttctgtttggggtggtttgcgtcttttgcagagaaagggatgggttttcccagcgcagcacctctctcttgccccatcccgcacacacatcccctacactcagagacaatagaggcaaatccactcccagccacctctcaccactcctgtcccccattcagctccatggaccccaggccccaggaaagctgccaactgtctcctcgcccctccagctctctccatcctgctgtccccaatcctccatctcaagcccacaagatctttggccttgaccagcagagacttgactctccaagtctgataaaggagacctgaaggccaggcagtgtgccggcaaagactctcaggcagaggaactcagaagtgccagacttggatctggtagcttcatgtggggctggcccactgaggccctctcctggagccttgaactgtacgtgcacacgcagtcacacagtcactgcacacagacactgcacacacagtcactgtgcacacactcagtcactgcgcacacactgtgcacacagtcactgcacacagacgctgcacgcagtcactgcagtcactgcacacagtcactatgcacacacagtcactgcacacagacactgcacacacagtcactatccacacacacagtcactgcgcagacactgcacacacactgcacacacacaatcactgcgcacacacagtcactgcacgcagaaactggacacacagtcactatgcacacactgcacacaccactatgcacacacactgtgcacagtcactatgtacacacactggcactgcatgtagtcactatggacacacactgcacagtcactgtgcacacatacactgcacacactgtcactatgcaaacacagtcactgcacacagtcactatgcacacacactgcacacacagtcactgcacacagagccactatgcatgcacacacagtctgcattcacacattgaacacacagtcgctatacacacacagtcactgcacacacagtctatgcacccacacactgaacacacagtcactgcatgtacagacactgcacatagtcatgacctcttctctttttctcactcattctccaattctctctctctctcgctcttttttttttttttttttagacagagtctcgctctgtcacccaggctggcgtgcagtggcacaatgtcagctaactgcaacctctgcctccccgtttcaagcaattatgatgcctcagcctcctgagtacctgggattacaagcatgtaccaccacgccaggccacttcttgtatttttagtagagacagggtttcaccatgttggccaggctggtctcgaactcctgacctcaagtgatgcacccgcctcagcctcccaaagtgttgggattacaggtgtgagccactacacctggcctctaatcctcattcactgttcctgtctctgtgtctctcacatacagtcatgcatgcatgcacgcatgcacacacacacacactggccctctctgctacatctacccaccctgtacccccactccagtacatactgcacacatctctctccctcccccacttctcagccccttgcacaccccttgttctgttaaatctcaactgcctctgcccctctcctacccaccaatgaggcccttagagggacgccccaatggcatctttgccctggaatcatcccttccctgctggcaatacacatgcattcacccaccaaacatttaatgagcccctatttggtgccacagatggaattatgggcagaagcagacaccattactgtcccctcttaccacatacagtcaggtgggggaggcaggcatcggtcaaataaccccttgactccacttaaaattatacctgcactgcgagctgaaggatgagcagcattaacaaggcagagagagatgcacagagcattccaggcccaggacagcacatgcaaaggccctgtggtgggacggaacctgtgaggggtcaggatctgcaagcgagggaatgtggctgatgcaaagacagccgagaaaggctggcctggagacagccgaagaaggcagaaggggacaggacccggggctggggagggcggggctatattgtggaatatgggctttctcctaagcaccaggaagggcctgggaggataggaagcaggggaggcgcgactggtcatgtgactagacaagctcgctctggttgcagggcagggaacagcttgacaggaggctgggctggaggtgggcaccaggaatcgcagcaagagatgacagtggaggagagagaacagtgggagggttgtcctctgcaggacccagggaaagatcaggtctgaactgagatgaggtgcctgggagcagtcgggtctggcttaaaactgggagataggctgagcacggtgactcaagcctctaatcccagcactttgggaggctgaggcaggaagatcacctgaggtcaggagttcgagaccagcctgaccaacatggtgaaaccccatctctcctaaaaaatacaaaaattagccaggcgtggtggcaggtgcctgtaatcccagatcctcaggaggccgagacaggagaatcacttaaacctgggaggtggaggttgcagtgagccgaggtcgtgccattgcactccagcctgggcaacagagtgagactctcttaaaaaaaaaatactgggtgatagaggtgagcgagtgcaaggaaaggaccaggttgggggaagagaataggtgtgggcatagcaagtttgaggtgcctttaggacatcccgaaataagtcagataggcaggtgttgtgggggctgcagcttggagctgaggtctacaagtagtaggacttttctggagcccttaggtgggtggtctccatatccttctgagcacttgaggaacatctgagcacagcactggaaaagaaaagaccacaaggacgctgtcctcatgtcttccaggggctgtgtcccacccccatcacattctagccaggaagttcaggggaggtgttgaagagaggaagctgcacctcccaagccatggattgaaatgtggaaggcaggaagagggaacttgtcagaagttctgggggcagtggaaagaattggtactgatgcaggaagagatggagggtggatgagggcagactagtacccttcccccactgccccaaacccttcccgtctccacccctacctgcctcatgtgtctcctcccccacttggctccaagaagggaagcatgttttctgcacgcatctccctgccagatccctggcttttttgcatggttgcaagcttcccctgctctcctccaaacccccctcctgaggctgcttccagggtccgcctgccttcgcatgcctggccgagtccacatgttatgatccgccccatgaaagggatggcttgtactctggggttgaacgggagggggctggggatacctgagccatcggccccatccccaggtggagctgggtggccaggcagggatgggggtcagggcagcagggcacagagagtgactctgttagccaagctgggtttggggcttgttcgaggcactggagacattctcacagcacttgagcccagtgtggtcagggtaggatcccccagcccccttccccatcctagaggcctaaggacgcactgatgtgtcccagagagcatcctagacattgccatcaaacccagaggcctcagaaattccttgaactccagtccttgcctctcagctcccaggccaaagccagcacaagacacagatctggcagccagaaagccctctggaagccaccaagtaggatgcccatgtcacccaaactaggacacttttgaaacaggagggaggctgtgactgtatggtcaccctgtgccatttggggggtgaaggttagaccaagttaaatcttgctacgtggcctgtagcaaatcctacaaatcccatagaacaagtctgattaagccccttcccttagtgtggagagaccctctactcctcctgccttcaccctgctgggtactggccagcgaaggagggtttccatgtctgcctgaggctggggtctcaaactcaaatgcctctgggggccaggcagacaccagtcaaccaggaaagcaagtgccatttctaaaacgtgaggaccctggaaaactggagatcatgtggcctgcttccagggagcaatcgcagcaggcctggggttgccagaaagccagattggtgggcaaaatctcttgatttttaaacaatggcaataatttttaattaaaaacaaggacaaatgaaaaaacactgctcgggcccaacaaaacagttttattagctagatttggcccactcgtgacttcgagagtcccaccccccccaccaaggtcccttgaagccccacaatggccacttaactctagctggtctcctccctgactctccaactctctggccccctggttcttctagcttgggtgggaggaggcagaggcagtgactagacagggggtttttgagcagaggcagtggccacccagggaggtcctgggggcagggatggccccacctcccggcccccagcacccgccccttggtgggcccgggctgatttctgagctcacccacccatgggagctgagtgcttcctgcttcctgcaggcctggtcccgtgctactccacccagccccagaagctgagaagccatccctgagaggggggaaaagggccccaaatgcatcttctccgactcagcgggcagcgaggactcaccctgcagccgaacagtcccagctccctcccgtcctccccattcccgctcgccaagggggtaagaaaagatgctcttccgcttctcccaattggctcgagccgctgctcctcttggccgtggggtgaggtcagggcgggcaggagcgggtgggcagctcggcagggcagggcagggcagggtgcccggtgagtcccgtgacagatgcatttctggcccggagcgtaacatgccctcggaacccgcacatgtccaccaggcctgactgtgctggcgacctccacccccacccccgccctggtgtttgtgcatcgtacacgtatgatagattccgcaacttgaccggcttgtgtcctttcgtctcagtgcatttggttgttgggagaaacaaaaaccatctcgatttttttcctgattggatgattcggatatattttctttttcttgttcttttgttatttcttccccatccccgttcctttttcctcctttctttttcttttcttttccccattgtgggtggggctggcagggagggcttatgcttttgagttgatgccttttcctccctcccaccctctctctcccaacattattcctttttcgagtttttcctctgcatcattgcattaatagtgctttctctctccctccttatttggggtctggcttgcttttttcctgttggttggcttcatgtaggggcctctgtgagtggtgacagctctgagccttttggggtgggtggatggtcacccctcttcctccatctccccagaataacttcatcaacctgagctttctccgcctcttccgagctgcccggctcatcaaacttctccgtcagggttacaccatccgcattcttctctggacctttgtgcagtccttcaaggtgagtcctcgtccctgctgctggcccagggctgagaagacaggtgaccctcatgctctggctgaatgtagaagtcagattggaagtgcctctgtgatgtagtcgtgcagagaatctgttatctccaaggctgttgtcaaacttcctgtccctggtgtgtcttcagagctgtaagggcctcatcctagagcccccagagatgcccaccagccctggaaggactctggcacgtggcatatggccacccaacccagtggggcagagcactgggacaagggaggaagacagtgcggctgagggacccccagcactcttcttcattgccttttttcccaccaggccctgccttatgtctgtctgctgatcgccatgctcttcttcatctatgccatcattgggatgcaggtgagtgtcgtgtccctaaggttcccagagcctcccaaggagggcagccacccttagaaaggggtgggtcagaggagcctggttcacagaagcagccatggaggttgagctgggtttcccagaagccactggaggaatggcagcccctggtcgtcaccctccaattccacaggtgtttggtaacattggcatcgacgtggaggacgaggacagtgatgaagatgagttccaaatcactgagcacaataacttccggaccttcttccaggccctcatgcttctcttccggtgagaaggggacctgctctgataattctgtttccgtggggtggggtgcctgccttcatccttctgttcccatagaggatgtaccctcctcttccaatgcaagacgtgccctcctccttctcttctggcaggggcgcgccctcacccttcttttccggtagggggcgtgcccttctcttccggtaggggacgtgccggccttctcttccgatagggggcgtgccctcctcctccttttctggtgtgggggtggccagatgtgctcttatccttcttttcccgtgaggctggaaatgggtgtcgtggggggcccaggaatcctagcagggcagaagcagagggccctgggacatagtcatcaaggtcattttccaggcattatctctgaatcttcctgaccaccctgtgaggaagggattcttggcagccctatccgacaaataagaaaacaggcttacagaccgtgaggcttgattctttggttcatcatcttggctgcacacaaaagttccttcactcgttcagtgtaggttttttgggggggctttttttttttttttttttttttttggagatggagtctcgctctgttccccaggctggagtacagtggcgcgatctcggctcactgcaagctccgcctcccgggttcacgccattctcctgcctcagcctcccgagtagctgggactacaggcgcccgccaccacgcccagataatttttttgtatttttagtagagtcggggtttcaccatgttagccaggatggtctcgatctcctgacctcgtgatccgcccgcctcggcctcccaaagtgctgggattacaggcgtgagccaccgtgcccagcccttttttttttttttttttagatggagtctctctctgttgcccaggctggagtgcagtggcgccatctcggctcactgcaagctcctcttgtggaggtgtattgagcacctacagcatgccaggcagggctgaaaaacgaggatgcaccaggaaatagagaaaagagacattttaagcactttggaagctaacatccccatggggaagacgaataatcaggaaacaaattatagaggatgctggaaaaagataaaattcaagaataaaggggaatagggccaggtgcagtgactcgtgcctgtaatcctagcattttgggaggccgaggtgggaggatcgctttagcccaggagtttgagaccagcctgggcaacatagtgagaccccgtctctacaaaaaaattgtttttaattaactgggcatagtgccacacacctgtagtcccagctacttgggaggctgaggcaggaggattgctcgagcccaggagttccaggctacagtaagctatgattgtgccactgcactccagcctcggcaacagagcgagactctgtctctaaaaagaaaaatatatttttttaatttttaaaaaaagttacagaggtagatagtggtgatagttgcataataatgtgagcttacttaatgctactgaattgtacacttcaaaatggttaaattgataaacttcatgctgtgtgtattttgccacagtaaaaaataataatgtttttaatctaacaacaaaaaaagaatagagggccggcaggttatgcctctctgaaagtgtgacatttgagagaaattggcaagggagggagtcagtgggtatatggggaagggcaggccaagccgaggggactgcctgtgtaaaggccctgaggcaggagtatggctggcatgtttgaggactgtgaggagcccagcatacctagaacagagtgatctagggagaatatagtatgagatgactgtcaccttcatggaggggagcttttttttttttttaatctgagacagagtttcggtcttgttgcccaggctggagtgcagtggtgcgatctcggctcggcgcaacttctgcctcccaggttcaagcagttctcctgcctcagcctcccgagtagctgagattataggtgcccgtcaccacgcccagctaatttttgtatttttagtagagacggggttttgccatgttggtcaggccgttctcaaactcctgacctcaggtgatccacccgcctcagccacccaaagtgctgggattacaggcatgagccactgcacccggcctgaagggagcttttttttttttttgcttttttttgagacagaatctccctctttgtcacccaggctggagtgcagtggcgcgatctcagctcactgcaacctccgcctcctgggttcaagcgattttcctgcctcagcctcccaagtagctgagactacaggtgagcgccaccacaccgagcaaatttttggtatttttagtagagatagggtttcaccatgttagccaggatggtctcaatctcctgacctcgtgatccacccacctcagcctcccaaagtgctgggattacaggtgtgagccaccgcgcccagccaagaggggagcttttaaagcataacagtgaccagcctgagcaatgcagtgaaaccccatctctacaaaaaaaaatagtttaaaaattagccaggagtggtggcgtgtgcctgtagtccccagctactcaggaggccgaggcgggaggatcacctgagcctgggaagttgaggctgcagtgagcagtgattgtgccactacactccaacctgggtaacagagcaagaccctgtcaaaaaaaaaaaagagagagagagagaaaagaaaggaaaagaaagagagagagaaggaaaagaaaagaaaaaaacatatcagtgtcctcaaatcccaccctagaccaactgaatccaagtctgctggggtggggcacgggcattggtattttttcaaagctctctgtggacttcagtgcacagccaagaatgtgaattcccttctctcagctcccagtaaaaggaggtggtccacctggggcttgcctggccagctccagagcccaagtgctcaacgtgtgtgctccacctcctggggaggcgttggtacccagtcagggctgggtgtccgagtctctgatttctccctgtcctcaggagtgccaccggggaagcttggcacaacatcatgctttcctgcctcagcgggaaaccgtgtgataagaactctggcatcctgactcgagagtgtggcaatgaatttgcttatttttactttgtttccttcatcttcctctgctcgtttctggtgagtctgtggacactgtgagggccgtctgggctccctaagcctggcttcctttcaggggagtgggtttctgtggaatgtggctgtgtcgaaggcttgttccctccaaggcttctctgaaccagcctgggatcaggtgaccctgagcgtctcaaactcagcactgttgacatttgggggtggctgattctttggggtggggccatcatgtgcactgcagtgtatggcagcatccctgtcctccccccaccagatgctggcagcacacgccacccgttcctcctgttgtgacaaccaaaaatgtctccggacattgccaggtgcccccagggggtgggggtggggttgggagtgggggccagaattcccccatttgagactcaatgaaatatttcagctgggcgtagtggccgatgcctgtaatcccaacacttcgggaggctgaggtgggagggtcacttgagcccaggaatacaagaccagcctggacagcatggtgtgaaacccatctctttaaaaaaaaaaaaaaaaattgaattagctgcacacgtggtgctgtgcacctgcagtcccagctactcaggaggctgaggtgggaggatcacttgagccttggaggtcgaggctgcagtgagccatgatcacaccactgcaccccagccagggcgacagaatgagatcctgtctcaaaaacaaacaaaaacaaacaaaaaaaaaaaaaacattgcgagggaagaaatacctcactttggccttgttgggggcagatgtgggaggatttggggtcacagtggttctcttggtgttggtccctgtttcagaagcctcccctccctctcactgactctgtttctttccatcattcttggtctttgtctctctctctcttttttttttttctttgaaatggagtctcactctgttgcccaggctaaagtgcagtggcgagacctcagctcactgcagcctccacctcccaggttcaaccgattcttcagcttcaacctcccaagtagctgggattacaggtgcacatgccaccacacccagctaatttttgtatttttagtagagacagtgtttcaccatgttgaccaggctggtctcaaactcctgacctcaagtgatctgtccacctcggcctcccaaagtgctgggattacaggcgtgatccaccgtgcccggccagtctttgtctctttgtatctctctctctccatctctctctgtttctctcttcctcttccccatctctccacttgatctctctctcactggacctccttgtgtgagtgagcatcacctctccattccccagtctctttctgtctctgtctcatttcctttccccatcttctctctatccctctctccatctgggcctctgtgtacatgtctttgggtctgtctgtccgtctgtctgtctgtatccttctcactcactcattcattccctcggtctctgcccccattctctcttggtccccggggtccccacagatgctgaatctctttgtcgccgtcatcatggacaactttgagtacctcacccgagactcctccatcctgggcccccaccacctggatgagtacgtgcgtgtctgggccgagtatgaccccgcagcttggtaagaagtcaccccgaatcctccagccacaatactcacctctccctggaactggaacacgggctaggtcaggccccagactctggagcactgaactcctggggtcctagcaggggtctcacaggttcagtcaggagagaagatataagaatcatcacccttgcataccccagattaaacacgtagggtgccaaccctgcccaaaccctggactttctgggaaatgagggagggcgtcaaccatgagatgtcctgaagagccctctcctcctacgagtctctcctgtctctcactgtgaagtctccagatggtgaggatgcattagccaggctccagggagaaaaccaacagcatcccagcctcagttctcttgagagtgtggggaggagggctggcctacccttggcagacaggattggcagcaacatcagagtagcagaactcagctcccactgggacccgtgaacctgggagtgagaggacatacaggccaggggaggacgcagagcctcaggggcccatgcatctttgtggccacaaagggagtgggcgctcccatctgggtagacaccagaggggtccctctccactgacgggcaatggtttcagagggtgggttccaccttgtgcacgtgtattgagtgcccacccaacaccaagccttgaaggacactcagaggctttatctgaatacctggaacccaccagccactaactgaggatttagttcaggctggtcttggggcctgaagaagcattactggggggccctcagcagcctaagccccatcttcctctggcctcagcaccagagaggaggccgtcacgaggaaggtgggcaggaggtggtcttggctattcccatagcctcaaacaagtactccatgagaccgagaggctggggagagccgtgggtctggggctgggctttggctggttcctaactcttcctcttttgattttaggtcacagcaattggatgctgtccccaaggcctctattccacaagcccccccccacccctgtagcccatgtagactgtggaggaggcagatgcagagagagccccaggggaggtgccctgcagtcccgaactcgactgacatcctacacccctgggtctccccagtgtctgggaatgtactggggaccttcacttgtccccagtctctcccactccttcaagccagggacaccccagcctcgggcatcatgacctcgctgtgtgcccagggagcccgtgtgaacccattgcctgcactaaccccctttcttctcctttcagcggtcggattcattataaggatatgtacagtttattacgagtaatatctccccctctcggcttaggcaagaaatgtcctcatagggttgcttgcaaggtttgacttccactaaaacctgctagcatccatggaatgagtgtggcttggggttcttcaatatatatatttcatatatatatatatatatatctctctctctctctaaaaaaacagagccatctctctttcttgcattaaactagaaaactctcttagccaacagaatgcagtcatgtagactcgataaagcatggaacatatttcctccttcccttcagccttcagccatctttgcttgctcttagctgaagctgcccatcctggggtctccacggcaccccaaatcagatacatcccctgggggattgtaactttgcatttctcccccaaccatcacctccactctctccccctccacccctcacctcccaaagcccctagccctcctcccctccctggcactggcccctgctccccacctaggccccctcagagaccagcctcagccaaaccagagaacgtgacccaactgtagaaataacagtgatggccgggcgcagtggctcatgcctgtaatcccagcactttgggaggccaaagcaggaggatcgcttgagcccaggagtttgagaccagcctgggcaacatagcaagaacccccttctctataaaaaattagccaggcattgtggcgcatgcctgtagtcccagctacttgggaggctgaggcagaaggattgcttgagcccaggaggtggaggctgcagtgagctatgatcacaccactgcactccaacccaggcgacagagagagaccctgtctctttaaaaaaaaaaaaaaaaaaaaaaaaaggcaatgaacaaaagcatggctctacgtcttccaaagtgagaattctccctcccctccgcatccctccagaactgtagctcagagcccacgctgaatctgacttttctcttttctctctctctccctgctcccgagcagtgaagtaatctttttttactgaccttttcttccattttttttcctcctcttttccattgatttgaaatatctattttatcattctctgcatctttctctctctattttttcggctcgtgtggatttcttttttctttcttctgtttctccccacctctcttcctttggttctctgttcccattcccgttttgtttttttgtttttgtttttgtttttttcattttcggtgctgccaggggccgcatgccttacctggacatgtatcagatgctgagacacatgtctccgcccctgggtctggggaagaagtgtccggccagagtggcttacaaggtagactacccttgccgaccaccgacgtccaggcactgggtttttttttcttcttcttcttctttttttttagtgctgaccagaaacacccggccgactctctttttccaacgtttctcttcttttttgtttttgattcttttttttcttttctcgagtcaactgatcatgaccatcccttgattctaagcagcacactgtgtccgtcctttctgatgagtgtcttcgtgttttgagactccattatggccgacatgccggggggagggggaggggagcgcccaggtccccttgcacctggtctcccaggtaccaaattggaaacaaacacgcttcttcagggagtcaaaacccatgcttcccacttctgcccacccagagcggcccccatgcccaggctggggcaggcgccttgcagagaggggctttagcccccgaaagcaggcgaggtcccgggtccccgcccctgccacgcacacctgaagctgatctctgacctagggccttggggattcgagaccttccaaggagcaccaagaacctctcttcccctcccttccttcccctggagtttcgtccccagcccccgtccctaatccccccaagacaccccaacatgcctctccattgttccagagtgggcaggcggccgcagctggacccctggacggtggcacactgatgcaggccatgcacgctgccttggcggggcctggggcgggcaggcaccatggccgacggggggtggtgcatgctggctgagagagcgagcgtcctgccgccaagcggctggcccgggccacccctccagatccctgtcctggaatctcccttggtgcccaaggacagatgctctgttccctccattcatccacaagaagttcagggatgacctttaaagattctccccacccaaaaagtattaccccatcatcctattctcccatccaccttgatcttccctgcgtccctatccatcaatgctatttgtacctgccccgtgttgccacctcattcctttccttcctctgtgcacccctcctcacctaacctatatgtctcccctccttctcaatcaaagccggggacaaggttgtcccaccagcatctcagacaatgagcctctcctggcacctgtcgctctgtgcccctccctgccgcccccccccccccccccggttttcctcaagtcgcttctctcagtctctgcttagatgaatgtgtgcgcatgtgcaagagagggagggcgagcccttcctctcctggtctttgtgcaggaccaccatgggtccataagacaactttgtgcaaatttgaaaaaggcaccctttccacagaacatgcctgttggaaaattgttgcaatctaccaatgtggtgagaacaagacactttttttctatcacctgggaagctgttatatttaatatacaaatcgggggctgggcgtggtggctcatgcctgtaatcctagtgctttgggaggctgagacgggaggatcacttgagcccagttcgagactagcctgggcaacatagcgagaccccatctctacaaaaagaaaaaatattttaattaataaataagtacataaatctatcatttccaagatgggagccctttgtgcggtgtacaacctgcacaactgtgcacagtggcccagtctatgtgtgtttctctatttcccacctccttccccaccctacccccagtgtcccctccagtgtcctgctctggatttaccatacccctccccatcttcaactctgtgtttcctgcccacttgtgtctgaatccccacccaagttgccctcaccccccttctctgtgccacttcagcctgggctggtgcacaccagcccagcatcctctcccatgccaccaagcatggtggacagagcccctgcctgggacatggggaatcttttcttccctgggctggaagggagtgcccctcaccccttccccctgccattgcacagagagccaagatctggacatgcccctgagatacacttcccacggagctatgaatgagtctcgagattccgtctgcatgcgcccctgtctgtgctgttctgtgtcacagcctcgctgcatgcctgcgaggggcctgccccgtcagtggggggctgcctgcctgctgcttctcagaggaatgatgtggtctgtgcccatctgctctgtcctggtctgggccaagccagggattgggtgtggggagccagtggcaccccccaccagcggctgtggtcctggccccctcagccttggctgttgcatgcactgctcaaatccagcttgtgctctttttctttggggtcagactgaaacggggccatccagaagaactctggggcagggcgggggtggggcaagggttgaggcaaaccctggaaatgccagctctcaggtcaagcaggtgggggaaaaaaggagagggcaggggaccagaagtacaagagagccttttgtgccctccctgcgggccaccaagagaaactgagtactgggacaggtaacctaagtaagagacacctcagccgccacagctttcagagttcttcctgggactccctgggtaggggcgggcgcggctcacgggagacccaggagggatgcctgggaatgactgcgcttgccttgggttttctgtagcggcttctgcggatggacctgcccgtcgcagatgacaacaccgtccacttcaattccaccctcatggctctgatccgcacagccctggacatcaagattgccaagggtaaggaagggacaggggcgggcacagacaggcgtgacagggtggaaccggggatctccctccctaccccaaactagaggatctgctgtcaccacccggatcttcattcactcttccattcattcgttccacagggttttttggggtttggggttttggtgtttttttttttttttttttgagacagagtcttgctctgttgcccaggcagcagtgcggtgacatgatcgcaagtcactgcagccttgacctcccaggctcaagtgatccttccacctcagcctccccagtagctgggactacaggcacacaccaccatactcggctaatttttttttttttggtgtgacaatttccctctgtcacccaggctgaagtgcagtggtgtgatcttggctcattgctacctccgcctcccgggttcaagcgattctcctgcctcagcctcccaagtagctgggattataggtacccaccagcacacccggctaattttttatattttgggtagagatggggtttcaccatgttggccaggctggtctcgaactcctgacctctggtctcaaactcctgacctcaagtgatccacctgcctcgacctctcaaagtgctggattacaggcgtgagccaccatgcccaacctaattttttatattttttatagagatggggtttcatcaggttgcccaggctggtctcaaactcctgggctcaagcagtcctcccaccttggtctcccaaaatgctggtattacaggcatgagccaccacacccggcccatttggcagatatttagtgcactccttcaatgtgccagagacccgtccaagcaggggaggacccagcagcttacactttagatggatggggaggccgccactgaggaggtaaggcagtgtctcatggatccctggggggaaggtgctccaggcagaaggactggcaaaggccctgacagaggggtgaacacaggacacccggggcattgagctgactcaccttctgagtgagggcacgccacgcaggttcagagcagaggaggaacctgacccaactcacatttgaacaggttccctccggccactgaggggatgggagaccgaaaggaggccagtgtgggggctgctgatatcatctgggtggagacagggcggcagcttagatctaggggtaggctcgacgtggtggctcacgcctgtaatctcagcactttgggaggccaaggtgggtggattacttgaggtcaggatgaccagcctggccaatgtggtgaaacccccgtctctactaaaaatacaaaatttagccagacgtggtggtgggtactgtagtcccagctactagggaggatgaggcagaagaatcgcttgaacctgggaggcggaggttgcagtgagccgagatcacgccactgcactacagcctgggtgacagagcaagactctgtctcaaaaattaaattaaattaaattaactggacatggtggcatatgcctgtggtcccagctactcaggaggcagagatgagagtattgcttgaagccaggagtttgaggctgcagtgagtcatgatcgcaccactgcactccagcctgggcgacagaacgagatcctagctcaaaacaacagaaagaaaaagaaaaaaacattttttttaaagctgagaaggggctgggcgcagtggcttacgcctgtaatcccagcactttgggaggccaaggtgggtggatcacgaggtcaggagttcaagaccagcctggccaacatggtgaaaccccatctctaccaaaaatacaaaaagtagccgggtgtcatggtgggcgcctgtaaccccagctactccggaggctgaggcaggagaatcacttgaacctgggagacagaggttgcagtgagccaagatcgcgccactgaactccagcctggatgacagagcaagacgctgtctcaaaaaaaaaaaaagctgaggccgggcacgctggctcacgcctgtaatagcagcactttgggaggccgaggcgggcagatcatgaggtcaagaaatcgagaccatcctgggtaacacggtgaaaccccttctctactaaaaatacaaaaaattagctgggtgtggtggcacgcacctgtagtccctgctactcagaaggctgaggcaggagaattgcttgaacccgagaggcagaggttgcagcgagccgagcttgtgccactgcactccagcctgggtgacagagtgagacttcatctgaaaaaaaaaaaaaaaaaaagccgagaaggctggacatggtggctcacacctgtaatctcagcattttgttgaggccaggcacagtggttcacgcctgtaatctgagcacgctgggaggccgaggtgggtggatcatttgaggtcaggagttcgagatcagcctggccaacgtggcaaaaccctgtctctactaaaaatacaaaaattagccgggtgtcgtggcgtgtgcctgtaatcccagcactttgggaggctgaagcgggtggatcacttgaggtcaggagttcaagaccagcctggtcaacatggcaaaaccctgtctctactaaaaatacaaaaattagccaggtgtggtggcgggtacctgtaatcccagttactagggaggctgaggcagaagaatcacttgaacccgggaggcagagattgcagtgagccgagatcacatcactgcactttagcctgggcgacagagcaagactccatctcaaaaataaaaataaaaataaaaaataccgagaaattcccccaaagacctagctcagggctcactctccatcattagggggaaagaagaagaggaggccagggaggcgggcagagaccagggcagtgtgggctcctggaggcagcttctatgtttaaaagggcggcttcaggaggaaggggaccaaccgtgtcaggcactgcccagagaccaaggatgacaaggatcacaagtgactggtcatcatggtcactttgaccagtgcagctttggcggaggggtcaggggtcccctgtctggagtgcatttcggaggcccgaaaggggatgtgatgtgatttggcagctgattaaggacagcagggcagagagacaggcgcacaattgccagaagaaacggggacctgaggctcacgcctgtaatcccagcactttgggaggctgaggaaggtggatcacttgaggccaggaatttgagaccagcctggccaacatggcgaaaccccatctccactaaaaatacaaaaattagccaggcatggtggtgcacacctataatcccaacaacttgggaagctgagcacaagaattacttgaacctgggaggcagaggttgcagtgagccgagatcaaaccattgcactccagcctgggggacacagcaagactctgtctcaaaaaaaaaaaaaaaaagaaagaaagaaagaaaagaaaaaacaaatgggaccagaaaaaaggagtgggtgggagaggagcaggtggatagtcccacacatgggaaggtgctgagcccagctgaaaccactagtaagtcaggaggagggaagactgagcctcgagacatatgtgccttccagggtcttgagggaaagaagggaggaagagccaaggccacgtggcaagactcaaggaggaagtggcagggaaggtgggggactggaggggtggaggacagatattgttaatgccaggaacaaagtgaaggtaaagagagcacaaggaagttgggagcagtggctcacacctgtaatcccagcactttgggaagccaaggcaggaggatcacttgaggccaggagttcaagatcagcctggccaacacagagagaccccatctctacagaaaattttaaaattagccaggtgtggtgatgtgcacctgtagtcccaactacttgggaggctggagtgggaggatcactggggactgggatgtcaaggctgcagtgagctatatgatgaccacagacatagcagcttaagacacacctatttgtcagctcacagtcctgtaggtcagaagtccaaaaagctggactgggctgtctgctgagggtctcacgaggctgaaatcaaggtgtcagccaagctgggctcctctctggaggatctgggggagaatctacttccaggttcattcaggtgttggcagaattgaagtccttgtggctgtaggactgaggtcttgttttatcactggctttttagctttttgctcctggaagtgcatgtaatcctccatgtgctctcattctctctgacttccccatctgccacccagcagagacaatactgtgcttttcaagggctcacctgattggggcaggcctaccctgatcatctctgtattttgaggtcagctgacttgatattttttttttttcttgagacagaatttcactcttgttgccaaggctggagtataatagtgtgatctcagttcactgcaatctccgcctcccaggttcaagcaattctcctgcctcagcctcctgagtagctgagattacaggtgcccaccaccacgcccagctaaatttttttgtatttttagtagagatggggtttcacaaggttggccaggctggttttgaactcctgacctcaggtgatccacccgcctcagcctcccaaagtgctgggattacaggagtgagccaccatgcccagcattttctttctttttttttttttttttgaaacggagtcttgttctgtcacccaggctggagtgcagtggcgcaatctcggctcactgcaacctccatctcccgggttcaagtgattctgcctcagcctcccaagtaggtgggactacagatgcgtgccaccacgcccggataattttttgtatttttagtagaaacggggtttcaccatgatagcaggatggtctcgatctcccaacctcgtgatctgcccacctcggcctcccaaagtgctgggattacaggcgtgagccaccgcaccgggcctccggtattttaattatatctgcaaagtcccttcatagcctgggcaatggtccctagattagtgtttgaataaacagaatcttggcagaagggcagcttttgaattctgcctaccacagttccttcgtttgtacaacgggtctaacaacacccccactctttgtatgtaatgccatcgtaactcagcttctgtggcactctgagaatctgtgttcaggggtcccaaaaccacccacaggttcagtgattccctggaagaactcagaactgagaaaagtttttatactcacagtttattacagtgaaagaatatagattaaaatctgcaaagggccgggcacggtggctcacgcctgtaatcccagcactttgggagggcgaggtaggcagatcacttgaggtcacgagttcaagaccagcctgaccaacatggtgaaaccctgtctctactaaaaatacaaaaattagccaggcgtggtggctggcgccagtaatcccagctacttggaaggctaaggtaggagaatcacttgagcccaggaggcagaggttgcagtgagccgagatcccgccacttcactccaggctggacagagtgagactctattagaaaaaaaaaaaaaaaaaaaatctgcaaagggcctggcatggtggcttacgcctgtaatcctggcactttgggagggcaaggcgggcagatcacttgaggtcacaagtttgagaccagcctggccaacatggcgaaaccccgtctctaccaaaaatacaaaaattaggcatggtgccagacccctgtaatcccaactactcaggaggctgaggcaggagaatcgcttgaccctgggaggcagaggttgcagtgagctgagactgtgccattgcactccagcctgtgtgacaagatcaaaactctgtccaaaaagaaaattagccaggtgtggtggcatacacctgtagtcccagctactccagaggctgaggcacaagaatcctttcaacccaggagatagagctacattaagccaagatcacgccactgcactccagcctgggcaacagagcaagactctgtctcaaacaaacaaacaaattccaaaaacataaaatgcgcaaaggaagggcatctggggaagggtccaggagacaccaggtgcgagcttccagttgtctgcctccagtggagttgcacagacaacgcttaattctccctgcagtgtgtgacaacacgcaccgtgtactgccaaccagggaagctcacctgagccttggtgccccagggtttttattgagggtttgtcatataggcagggctgacgtagttactcagtctccagtccctccagaggtcaaactgataccacgtggcccaagaccccaacgataaatcgcattgttagaatgaactgtatggaaaattatccaggcgtggcggcgggcggctgtaatcccagctactggggaagctgaggcaggagaatcacttgaaactaggaggccgaggttgcagtgagccaagatcgcaccattgcactccagcctgggcaatagagcaaaaacaccatctcaaaataaataaataaatagaatgaactgtattggccgggtacagtgactcatgcctataatcccagcactttgggaggctgaggctggaggatcgtttgaggccaggagttcgagaccagcctaggcaacatagtgagaccctatctcttttttttaaaaaaaaaaaaaaaaaaaaaaaagaatgaactatacagtgtggcccaaggccccctgctaaataaagacactcttcaggcaggacatttcaaaggcttagagatcacctcccaggagcaagtcaatgggccagtcctttcatcggaatgtgcagggtttggacaacactagcctactgagctagtccttactgcttagcaccccagcttctatgacacctactggattcccttcctgagggtttcaaagactcctggagatgtctctgaatttggctgtcacagttgttacttgtaccccagatgccactcagttccctgaagacaatgatcccccagatttctcagccaggagcccctccacctcttgtcctcagtgggtgccaggcctcatcctggagttccacagctgagccaggctctcggggttacggaaggtcaagagggtgtggggacaacaatggaagagtgataacagtggcagccctttgagcagatgcgggtctcaggagaacataacgcgctttcttttcatagttcagctcactttctaagcacactgagcttcctttccagcaggctaaggggctgcaaagggggtacagattaacctcattcttcagattctcaaaaatggtgtcaccattcattgctggagactgggagaaagggggcaagtccatctcattctctctgtctctgtctctctctctctcttccctgtccatctgtttctctctcccacccacccctctgttctctctgcccagaagaatctctattttggttttggttttgtttgttttgtattgttttgagacggagtctcgttctgtcgcccaggctggagtgcagtggcgcagtctcaactcaccactgcagcctccacctcccaggttcaagcgattctcatgcctcagcctcccgagtagttgggattacaggcgcacgccaccacgcccagctaatttttgcatttttactagagactggtttcaccatgttgaccaggctggaccctatcctctttcaagccccccaccccaggcattgagggcagagccaactacctgcctgaaccaattagcatattaaacgtaaacccagttagcatatccaaatagcagcccacagtgacattctgactgtcagaatgtggattgcttgagcccaggagctcaaggcttcggtgaacaaagattgtgccacagcctgggcaacagagtaagtccctgtcgatcgatagatagatgatagatagatagatagatagatagatagatagatagatagatagatagataaatttttaaaaaaaataataggccaggcacagtggctcatgcctgtaatcccagcactttgggaggccgaggcaggcagatcacctgaggtcaggagttcgagaccagcctggccaacatggtgaaaccctgtctctacaaaaatataaaaatagccaggcagatgtctgtaatcccagctactcaggaggctgaggtaggagaatcgcttgaactctgaaggtggaggttgcagtgagccgagatcatgccattgcactccagcctgagtgacagagcgagactccatctcaaaaataataacaataataaaaataataataaatgctctggccccaaagtggcacattacatggtgcacaccccattagcaaggactcatcacatggccctgccaaccacaggaggaacccccccatgtactcaggtaggagggccaggaaacaccgtcagagagctttaatgactcaccccatgactggggtgagggacgagggactggctgcaggccaagggcatgtccgtggcagtggagacttgggaaaggggaaaagacctcctctgagccacgcacagtggctttcatctgtaattccagcactttgggaggctgaggtgggaggatcttgagcccaggaggtcgagactgcagtgagctatgtttgtgccacggcactctagcctgggcgacagagcaaaaccctgtctcaaaaatcaaaataaaaccaaaaccaaaacttcctctgttggggatgctccagggcgtcccagccttgaacagatgggtcactgcagtaataatcctatggcagacactgtcccaaggctgcacgcacgttactttgatcatcaaacaaccaggtgatagccaggcatggtggtgcgtgcctgtagtcccagctactcaggaagctgaagcgggagaatctcttgaacctgggaggcggaggtaacagtgagtcgagatcacatgactgcacttcagcctgggaacagagagagactctgtcaaaaaaaaaaaaaaaacaggccagacgcggtggctcacgcatgtaatcgccagcactttgggaggctgaggagggtggatcacctgaggtcaggagtttgagaccagcctggccaacatggtgaaaccccgtctctactaaaaatacaaaattagttgggcgtggtggtgcacacctgtaatcccagctactcgggaggctgaggcaggagaatcgcttgaacccaggaggcagaggttgcagtgagctgagattgcaccattgcactccagcctgggcaacaagagtgaaactccatctcaaaaaaaaaacaaaaaaaaaacaaccagccaggcgcggtggcttacgcctgtaatcccagcactttgggaggccgaggcgtgtggatcacccgaggttaggagttcgagaccagcttgaccaacatggtgaaactccgtctctactaaaaatacaaaaaattagccaggcatggtggtgcatgtctgtaatcccagctactcgggaagctgagacaggagaattgcttgaacccaggagtcggaggttgcagtgagccaagctcgtgccactgcactccagcctgggcaacagagcaagactctgtctaaaaaaaaaaaaaaaacacacacacacacacacaacaaccaggtgaggcaagtactcttgctatcatctccatttcacagatggagaaactgagttactaagtggtagagtaacctaagtcatgcagccgataactgggagacaagattgggacccaggtcgcccagctgttctccatgccgggctgtctcctgcacagctgctccatggtcctggccccaccgaaaaccagagcccacaaggtcattccagcagcactgcccagggcctcctctgggccaggccgttggggaactggagaccccatggggaccagaaagattggggtctcgttctcgggagcctatggctttgcagctgacccagagtccagctgacacccaggcaggcagtcagggtctgtctacacccccattgcaggaggagccgacaaacagcagatggacgctgagctgcggaaggagatgatggcgatttggcccaatctgtcccagaagacgctagacctgctggtcacacctcacaagtgtaagagctgagcccagccctgggatccaatccaccaggacagatggagggggagggaaaggggaggcctggggagagtgttggcctgggctggtatacacagggacccaggacaagggccccaaagaggcctgcccttggtgagctcaccgtgtgtgtgcccccagccacggacctcaccgtggggaagatctacgcagccatgatgatcatggagtactaccggcagagcaaggccaagaagctgcaggccatgcgcgaggagcaggtgcgctgttcgccgctctggggacatctgggctggggacagtggcttgcatgtcaccacgggaaccaactggaatatgagggtggctgagccccagggcaggtccctgaaaagtaggggctgtgcacagcagctcacacctgcaatctcagtgctttgagaggccagggcagagggatcgtttgagaccaggatgagaccaccctgggcaacacagtgagactccatctctacaaaataaaacattagccaggcatggtggtgcacacctgtagtcccagctatttaggaggccaagatgggaggatcacttgaggccaggagtgggagaccagtctgggcaacatagaaagacccatatctctacaaaaaaaaaataaaattagctgcatgtggcgccatgcacctgtggtcccagctacttgggaggctgaggcaggagaatcacttgaacctgggaggtggaggttgcagcaagccaagatcaagccactgcactccagcccgggtgataagagcaggactctatctcaaaaaaaaaaaaaaaaaaaaaaaaaaaagttcttgccaaggacacatcatgtggattcattcttcattcagctgctccaccaacacttattgagtattactgtgtgcagggcgctgttctcagtcctcggggatgcacccatggggaaaataggccagaatccctgccctcagggagcagacattccaagtggggaaatgccaatggtagcaaatgactgaatcgtgcaacatccagcaaagagaaagaaagtgtcgtgggggaaagtggagaagaatccagaagataggagtatccaggggaggaggggatgcggtgggaaatgggtagttggggagcctccctgagaaagtgacatgtgagcaaaggcttgaaggaaaaggggagagggagtgagctaagcaatacctggaagggtgttccaggcagaggaaacagccagtgcaaaggctctgaggctggaccgtgcctgggttgtttgggtaacagcaaagaggccagtgtggtggaaaagagcagggaggagacaagggcaaggaggtgacagggcagatccttcagggccatgggagctgcaggaaggactctggctttttccccaagcaagtgggagccatggagggttctaagcaaaggagggataggacctgactcaagtgctcatgggcgccctctggtggctcttgtggaacagtggggttgaaggtaggagcgggagacctgggagaaggtgcctgcagtgagagatgaggacgtgggaccaggctggggctatgacttgggtggaggagtgagaagtggtccagttctgcgtggaattggaagggtctagatggatgagacctgagagagtgtgtgtgtgtgtgtgtgtgtatactggggatgtcgcaatgccttctgggtaccaccgtcccaccaccccacccttgtccacacactgctctctgccccattccccaggaccggacacccctcatgttccagcgcatggagcccccgtccccaacgcaggaagggggacctggccagaacgccctcccctccacccagctggacccaggaggagccctgtgagtgtcacccctgccagggaggtggagtgtgggggtgccgtggtccccacgttctggaagctgcccaagcgcccactgctaccccggcctctgtcccccatgcaggatggctcacgaaagcggcctcaaggagagcccgtcctgggtgacccagcgtgcccaggagatgttccagaagacgggcacatggagtccggaacaaggcccccctaccgacatgcccaacagccagcctaactctcaggtgcctctgtcccccaactccccaatggctcccagggcccgggtggttcaggtggaagggatctgggccccccacacacacacacctgcagctccctccctctgcagacaccagggatctggaggtcaggccccagagctcatctggctttgccatctgctccgcagtccgtggagatgcgagagatgggcagagatggctactccgacagcgagcactacctccccatggaaggccagggccgggctgcctccatgccccgcctccctgcagagaaccaggtgagggctttcaccactgccctggggctggacccctcactctgcactgggtagggccaggcccccccacaagcagcccagtgcatcccctccctgccggactcaggcctgggtagggactccttcagtctctgaagcagtctgcaggccccacccaccacctggtcacacctggagcacctgcagaccctcctccctcacagaggacagagaggaaagtgctccccctggggcagagggcagtggccactgcaaaatggtctctggctgccctggttggaggctgcagacaggggaggttgtggaagatttgtgggtgcagcagggttcaacagggccagctgagacctgccacgaagatcacccctacacaaacacacacacacatgctcaacatacatgcacacacatgtgcagctgtgcgcctactcagatgcttgcatacacacacgtgtgtgcacgtgggcatatacacactgcacatgtactcacacatgcacacatgtacgtgcacacgtgtctgcatatgggaacttggcaggtcctaggatacagtagcagagtctggggtgggtctgggggcagctgggctcgtattttctgtctggtctctgtgggagtcattggggggcacaggggtgtgtgcttgatgtgtgtctgtgtgtggccgcttcacccagctgccaggcccacctgcaggtgatcccgttgccttggactcatgggacagagggcccagaggcatagctggctgcccacccggcctgaacagcgggggcccatgcacgcagcccgcctctggaggagaacagggcatggctgtgagagcctggcccgggtgcgtggcatgtgtggctgtggcgagctttccgtgtgccgtgtgtggcgtctgcacggggcaggaggctgtgctgtgcctggctggaccagggtcacctgagggcctggcctctggctgctgggaacgtgggttggggagcacccagcgtgcatgctgctgctccctcaggaccgagctgctgggccccaggagagggttgggacaagcccagctgacggccaccacatggaagctttgagcatcggccggagccaggggttggggtgtgcatcgcatgaggcagagcccagggccaggggctcgaggctgcgccgtcctgtctttcggtcccatgcctctgccatttgtctgtctgcatctcctgtctgtctcctctgtacccatgggaatagaggacgcccagccccgggggcctgggacacccacccgccaggactttaacttttcttttcctccctgccttctccctccgatttctcttgatgccagtgccactcccctccttggcttcttctccatgcaccacctcctcactctccctcttgccttttatatttattttcttctttctgttttttctgtgtgcaccatcccatggggctgtgacagaggagaaggggccggccacgtgggaataacctcagtgtatgtaccgcgcctgcccagcgcccagcagggctccggccccctcttcctccccaccccccctccagggagtcccgtcatctctcaccgtccccggaccccaccctttctttggcaatcgcaccctctcccctccatggagcccaatccttgtgtgtggtgtcctgtgtgtgcccctcacccataagccctggtgggcggggccatccccatcctcacccctacccccttttcttcagggccccccacgccggaggacactggctctccaagagcctggcccactctgcacctctttctggggggcttcttctcctgacaccaccaccaacccctggtcctgcagctcctacctggagcagggccaccagcgctcagctgggctggaccctgggaggcgggcgtctgccccatctccctccttccctcctctgcctgctgcagagaaacctgtgtgtcagggcttgacccagggatgaagcaccagggaaaagagtgggcccccagagcctccagtgcctgggtatcccccacccccacccagagctccctagcttgggcctcaccagaaggactcagacttgtgggggcagcgagcacagccccgttagccgggaggacccaaagctgccatgccgggcacctggtcctgagcccataggtcagccagccacagtcggaggcttctcaccctcccaggagagcaagctggggcagggatgagtgcggcagtccagggctcccaggtttgcaccctggatgtggagagggcttccctctggccagcctgagcctgcccaactgtggctgggcccccaggactggagagtgaggatcagatctttctggtcagaacccaggatgggctcaaaaggagcagtcctgtctctgagggacagaggaatcctcaggctccaccctcagaggcctggccacacccagagccctgattgatcagggggagccaaggccccatggcatcccctggcccctgccccaggatggtcacaccgcagtcaccgaaggccaccaccaggctgccacaatggggcaggaaggaccgggaccacttggtgctagctgctgaccccagcccaccggcctgtcccctcccccagaccatctcagacaccagccccatgaagcgttcagcctccgtgctgggccccaaggcccgacgcctggacgattactcgctggagcgggtcccgcccgaggagaaccagcggcaccaccagcggcgccgcgaccgcagccaccgcgcctctgagcgctccctgggccgctacaccgatgtggacacaggtgggcagccctgtggtgctcagggacaagcagaacagaggagaggagaggggaggagaaggcagggcggaggagacactaaggaagaagaaagggagaggcctccatggagaggggacagagggggccaggcagcagctgcaggaacctgggtactaccccctccccccaacccactgacctgcctcggttcaggggatctctagggcccccacaccttccaggtggcctcctgtgtgtgcatctgccccacctctccctcacgaccacctgtgtgtctgtctgaccctcacccggcccaggcttggggacagacctgagcatgaccacccaatccggggacctgccgtcgaaggagcgggaccaggagcggggccggcccaaggatcggaagcatcgacagcaccaccaccaccaccaccaccaccaccatcccccgccccccgacaaggaccgctatgcccaggaacggccggaccacggccgggcacgggctcgggaccagcgctggtcccgctcgcccagcgagggccgagagcacatggcgcaccggcaggtgggtgcggctgcaagtgaccccaggctgggctcggccgggaggcggggaggagagaaggggataccccatccaacagccactctaggcaaaggtccccggatcccggctgtgaccacctcccatcctgcccccaagccaccggggtgcccggcggccggagcggacacggatccccaccacaccagctgcctatgctgtccccccagcccccttgcccacccgccgccccctccccgccgcccgcagctgcttgctcctcggttgtggatcatatttgagttctgggccgtgccgcccgacctttcactttcctttaacccggcttctgtttttgtttcaattatgatttctgtcctctggacgcctgtgagtaatttttgaaacttctgctatttttaaccccgaaacttacaaaactccatttctcatttctcttttcactttgttgtgttggttttcgactcctcccctccctgtctcactccccctcctcccctccctcctccctgtggctgttgcttttttccattcaatgtcctgtgtcccccctctcctcctcctcctcctcctccccctccccctcctccctctcctcccggcccctctcccttcgctcccctctcttcctcccaatcccgtgtctcctttgattttgttgtatctttttttttgatttcctttgtttcaattttcgtgtagggcagtagttccgtaagtggaagcccagccccctcaacatctggtaccagcactccgcggcggggccgccgccagctcccccagaccccctccaccccccggccacacgtgtcctattcccctgtgatccgtaaggccggcggctcggggcccccgcagcagcagcagcagcagcagcagcagcagcagcagcaggcggtggccaggccgggccgggcggccaccagcggccctcggaggtacccaggccccacggccgagcctctggccggagatcggccgcccacggggggccacagcagcggccgctcgcccaggatggagaggcgggtcccaggcccggcccggagcgagtcccccagggcctgtcgacacggcggggcccggtggccggcatctggcccgcacgtgtccgaggggcccccgggtccccggcaccatggctactaccggggctccgactacgacgaggccgatggcccgggcagcgggggcggcgaggaggccatggccggggcctacgacgcgccaccccccgtacgacacgcgtcctcgggcgccaccgggcgctcgcccaggactccccgggcctcgggcccggcctgcgcctcgccttctcggcacggccggcgactccccaacggctactacccggcgcacggactggccaggccccgcgggccgggctccaggaagggcctgcacgaaccctacagcgagagtgacgatgattggtgctaagcccgggcgaggtggcgcccgcccggccccccacgcaccccacgcacacaccccacccgaggagccgcgcagaggccgcgggggcccagcacagagggcccgggagagggccagccgggagaccccagactctggagaggccagggctgggccacaagggtgtcccgcagagaccctcggccaaaagagaccctcctgggcagccacggcgccccccaaccagccccgatccccccacccacgacaggggctctcgggtgggaggcagggagcagacaaaccacacagccaagggatttgaattaactcagccatttttggagaactttggggaacatgaaaaaaaaaaaaaaaaaaaaaaaaaaaaacatttttaaaagaaaaaacggggagaaaaaaatagcttctattgatgagttttatcatctcaattgaatctttcctttccctgatgaagacagctggtggccgagtgcggcaaagaagccagaaggaaccagaatcccagtgccctacacccaccaccagacacactcacacccacacacgttctcagacacacacaagagtgcttgccggttataccaaaccctactattactgcctgcagaaatcaatttaaaaaaataataataacaataaacaattttaaaaaggacaaaaaaattaatgattgagaaaagaggcatttttttctgacatttggtcctgcttgaaacaacaaaagaagaagaaaaacccaccatcaccaccgattcctttgcttcttttttccttttttcctaccttgtttgaaaaccgtgggcttgggactgtgaattattgcatgacattcaaaaagaaaaaaaaaataaaaaaaagttgaatcaaagggcttttggataggagtggtctttgtcccttggctaggtgctgcctgggtgggtctctcttggggaatcatacaaagaggcacttctttgttagctcctagaagcactgtttgaaagcgacaaggaggccgggcatcatgcacgcctgtaatcccagcactttgggaggctaaggcagatggatcacttgaggtcaggagttcgagaccagcccgaccaacatggcaaaacctcatctctactaaaaatacaaaaaaaattagccatgcgtggttgcacaaactgtaatcccagctactccggaggctgaggcatgagaatcacctgagcctgagaggcggaggttagcagtgagccaagatcccaccactgcactccagcctgagtgacggaatgagactcttgtctcaaaataaaaaaaaaaaaggcagggcgcggtggctcacgcctataatcccagcactttgggaggccgaggtgggtggatcacatgaggtcaggagttcacaaccagcctggccaacatagtgaaacgccgtctttactacaaatacaaaaattagccacgcgtggtggtgggtgcctgtaatcccagctactcgggaagctgaggcaggagaattgcttgaacccaggaggcggaggttgcagtgaaccaagatcgtgccactgcactccaacctgggtgacagagcaagactccatcttagataattaataataataatttggtctcgtggacaccaacccccgcccccacgaagtgtttcagccatccccagagtccaatacccctttgagagcttctgttctcacaacagtacctgacccatagcaagctactattgactatcaccattactactgtagcattaaggcaaacattttgaacaggtcttgttccagacaacaggccctgcttgagcttaccttgggtaagaaatctgcagactccagatagcaagacaggtgtaagtccttctaaaataatggtaagccaaatgtggtggcacacacctgtagtcccagctgttcaggaggctgaggcaggaggatcacttgagcccacgaggtcaagaccagctatgatcacacctgtgaataaccattgcattccagcctgggtgacgtagaaagatcccatctctaaaaaaattaaaagtaaaaataaataaataaaataatggcatctaggaaaagatcagtccaacgagaagtcaaagttttgaggtcgagtgcggtgtctgactcttgtaatctcaacactttgggagaatcacttgaggccagtagttcaagaccagcctgggcaacatagcaagacgctgtctctaaaaaaaaaagtttgttttttttaaggctgggtacagaggctcacgcctgtaatcccagcactttgggaggccaaggtgagcagatcaccaagtcaggagtttgagaccagcctggccaacatagtgaaaccctgtctctactaaaaataaaaaaattagccaggtgtggtggtgcatgcctatattcccagatacttggcaggctgaggcaggaaaatcgcttgaacctgggaggcagaggttgcagtgagctgagattgcgtcactgcactgcagcctgggcgacagagtgagactacgtctcaaaaaaaaaaaaaaaaaaaaatggaatggaagggagggagggaggggtttaactttctaaccaggcaatctggcaaccaccacaggcttctaaacaagctgcccatccattgcagagctggcctctggtccccctcccatggtgctggggttgagtgtgtccaggagccactggagtaagccagggtttgtgcaattccctctgctgtcaatgaggctgcagccatctgtcctcccaggaatgaagttcactaccgaagccccccatgagccctgaactcaaaggccaagtctatgcccgagtgccaagaggtagacccaaggcctccacagtgcacatcatcaggctagagtgttagttgcccaggagacacagggtgggaagatcaggggatgaggaagaggggcggagcttggcctagtccccagtctcacatactctcaggccattgcttgagcctcatcacctggaaggttggaagggcatgattgtcatagaaatgccctgaggtgaccgggcgcggtggctcaagcctgtaatcccagcactttgggaggccgaggcgggcagatcatgaggtcaggagatcaagaccatcctggctaacacggtgaaaccccgtctctgctaaaaatacaaaaaatcagccgggcatagtggcaggcgcctgtagtcccagctactcaggaggctgaggcaggagaatggcgtgaacccgggaggcagagcctgcagtgagccgagatcatgccactgcactccagcctgggcaacagagcgagactcaagaaaaaaaagaaaaagaaatgccctgaggtgcaaaagcccaggcattggccgggcgcggtgtctcacgcctgtaaccccagcactttgggaggccaaggtgggtggactgcttgagctcaggagttcgagaccagcctgggcaacatggcaagaccttgtctctactaaaaataaaaaaaagcagagtgtagtggtacatgcctgtggtcccagctactcgagaggctgaggcaggaggatcacttgagcccaggagttcgagaccagcctgggcaacatggtgaaaccccattcctacaaaaaatacaaaaattggccaggcgtggtggctcacgcctgtaatcccagcactttgggaggccgaggtgggcggatcacctgaggtcgggagttcgagaacagcctggccaacatggaaaaaccccatctctactaaaaatgcaaaattagccgggcgtagtggcgcatgcctataatcccagctactcgggaggctgaggcaggagaatcacttgaacctgggaggtggaggttgcagtgagccgagatcatgccattgcgctccagcctgggcaacaaaagcgaaactccgtctcaaaaaataaataaataaataatacaaaagttagcccggcatggcggtgcatgcctgtggtctcagctacttgggaggctgaggtaggaggatcacttgaacccaggaggtcaaggcatcagtgacctatgatcacaccactgcactccagcctgggtgacagagcaaaaccctgttccaaaaaaaaaagagagagagggagacagagagttattttaggaaggtttgtttatgtagactcatcttgggactgactatctgcagtgataggagtcattctgctctccctggtaaggagacggggggatacctccacaaaggaaaatttatgtcacctttttttttgaaacggagtcgcactctgttgcccaggctggagtgcagtggtgcaatcttggctcactgcaagctctgcctc

SEQ ID NO: 113 - DNA, 8641 bp, Homo sapiens
gatgtcccgagctgctatccccggctcggcccgggcagccgccttctgagcccccgacccgaggcgccgagccgccgccgcccgatgggctgggccgtggagcgtctccgcagtcgtagctccagccgccgcgctcccagccccggcagcctcagcatcagcggcggcggcggcggcggcggcgtcttccgcatcgttcgccgcagcgtaacccggagccctttgctctttgcagaatggcccgcttcggagacgagatgccggcccgctacgggggaggaggctccggggcagccgccggggtggtcgtgggcagcggaggcgggcgaggagccgggggcagccggcagggcgggcagcccggggcgcaaaggatgtacaagcagtcaatggcgcagagagcgcggaccatggcactctacaaccccatccccgtccgacagaactgcctcacggttaaccggtctctcttcctcttcagcgaagacaacgtggtgagaaaatacgccaaaaagatcaccgaatggcctccctttgaatatatgattttagccaccatcatagcgaattgcatcgtcctcgcactggagcagcatctgcctgatgatgacaagaccccgatgtctgaacggctggatgacacagaaccatacttcattggaattttttgtttcgaggctggaattaaaatcattgcccttgggtttgccttccacaaaggctcctacttgaggaatggctggaatgtcatggactttgtggtggtgctaacgggcatcttggcgacagttgggacggagtttgacctacggacgctgagggcagttcgagtgctgcggccgctcaagctggtgtctggaatcccaagtttacaagtcgtcctgaagtcgatcatgaaggcgatgatccctttgctgcagatcggcctcctcctattttttgcaatccttatttttgcaatcatagggttagaattttatatgggaaaatttcataccacctgctttgaagaggggacagatgacattcagggtgagtctccggctccatgtgggacagaagagcccgcccgcacctgccccaatgggaccaaatgtcagccctactgggaagggcccaacaacgggatcactcagttcgacaacatcctgtttgcagtgctgactgttttccagtgcataaccatggaagggtggactgatctcctctacaatagcaacgatgcctcagggaacacttggaactggttgtacttcatccccctcatcatcatcggctccttttttatgctgaaccttgtgctgggtgtgctgtcaggggagtttgccaaagaaagggaacgggtggagaaccggcgggcttttctgaagctgaggcggcaacaacagattgaacgtgagctcaatgggtacatggagtggatctcaaaagcagaagaggtgatcctcgccgaggatgaaactgacggggagcagaggcatccctttgatggagctctgcggagaaccaccataaagaaaagcaagacagatttgctcaaccccgaagaggctgaggatcagctggctgatatagcctctgtgggttctcccttcgcccgagccagcattaaaagtgccaagctggagaactcgaccttttttcacaaaaaggagaggaggatgcgtttctacatccgccgcatggtcaaaactcaggccttctactggactgtactcagtttggtagctctcaacacgctgtgtgttgctattgttcactacaaccagcccgagtggctctccgacttcctttactatgcagaattcattttcttaggactctttatgtccgaaatgtttataaaaatgtacgggcttgggacgcggccttacttccactcttccttcaactgctttgactgtggggttatcattgggagcatcttcgaggtcatctgggctgtcataaaacctggcacatcctttggaatcagcgtgttacgagccctcaggttattgcgtattttcaaagtcacaaagtactgggcatctctcagaaacctggtcgtctctctcctcaactccatgaagtccatcatcagcctgttgtttctccttttcctgttcattgtcgtcttcgcccttttgggaatgcaactcttcggcggccagtttaatttcgatgaagggactcctcccaccaacttcgatacttttccagcagcaataatgacggtgtttcagatcctgacgggcgaagactggaacgaggtcatgtacgacgggatcaagtctcaggggggcgtgcagggcggcatggtgttctccatctatttcattgtactgacgctctttgggaactacaccctcctgaatgtgttcttggccatcgctgtggacaatctggccaacgcccaggagctcaccaaggtggaggcggacgagcaagaggaagaagaagcagcgaaccagaaacttgccctacagaaagccaaggaggtggcagaagtgagtcctctgtccgcggccaacatgtctatagctgtgaaagagcaacagaagaatcaaaagccagccaagtccgtgtgggagcagcggaccagtgagatgcgaaagcagaacttgctggccagccgggaggccctgtataacgaaatggacccggacgagcgctggaaggctgcctacacgcggcacctgcggccagacatgaagacgcacttggaccggccgctggtggtggacccgcaggagaaccgcaacaacaacaccaacaagagccgggcggccgagcccaccgtggaccagcgcctcggccagcagcgcgccgaggacttcctcaggaaacaggcccgctaccacgatcgggcccgggaccccagcggctcggcgggcctggacgcacggaggccctgggcgggaagccaggaggccgagctgagccgggagggaccctacggccgcgagtcggaccaccacgcccgggagggcagcctggagcaacccgggttctgggagggcgaggccgagcgaggcaaggccggggacccccaccggaggcacgtgcaccggcaggggggcagcagggagagccgcagcgggtccccgcgcacgggcgcggacggggagcatcgacgtcatcgcgcgcaccgcaggcccggggaggagggtccggaggacaaggcggagcggagggcgcggcaccgcgagggcagccggccggcccggggcggcgagggcgagggcgagggccccgacgggggcgagcgcaggagaaggcaccggcatggcgctccagccacgtacgagggggacgcgcggagggaggacaaggagcggaggcatcggaggaggaaagagaaccagggctccggggtccctgtgtcgggccccaacctgtcaaccacccggccaatccagcaggacctgggccgccaagacccacccctggcagaggatattgacaacatgaagaacaacaagctggccaccgcggagtcggccgctccccacggcagccttggccacgccggcctgccccagagcccagccaagatgggaaacagcaccgaccccggccccatgctggccatccctgccatggccaccaacccccagaacgccgccagccgccggacgcccaacaacccggggaacccatccaatcccggcccccccaagacccccgagaatagccttatcgtcaccaaccccagcggcacccagaccaattcagctaagactgccaggaaacccgaccacaccacagtggacatccccccagcctgcccaccccccctcaaccacaccgtcgtacaagtgaacaaaaacgccaacccagacccactgccaaaaaaagaggaagagaagaaggaggaggaggaagacgaccgtggggaagacggccctaagccaatgcctccctatagctccatgttcatcctgtccacgaccaacccccttcgccgcctgtgccattacatcctgaacctgcgctactttgagatgtgcatcctcatggtcattgccatgagcagcatcgccctggccgccgaggaccctgtgcagcccaacgcacctcggaacaacgtgctgcgatactttgactacgtttttacaggcgtctttacctttgagatggtgatcaagatgattgacctggggctcgtcctgcatcagggtgcctacttccgtgacctctggaatattctcgacttcatagtggtcagtggggccctggtagcctttgccttcactggcaatagcaaaggaaaagacatcaacacgattaaatccctccgagtcctccgggtgctacgacctcttaaaaccatcaagcggctgccaaagctcaaggctgtgtttgactgtgtggtgaactcacttaaaaacgtcttcaacatcctcatcgtctacatgctattcatgttcatcttcgccgtggtggctgtgcagctcttcaaggggaaattcttccactgcactgacgagtccaaagagtttgagaaagattgtcgaggcaaatacctcctctacgagaagaatgaggtgaaggcgcgagaccgggagtggaagaagtatgaattccattacgacaatgtgctgtgggctctgctgaccctcttcaccgtgtccacgggagaaggctggccacaggtcctcaagcattcggtggacgccacctttgagaaccagggccccagccccgggtaccgcatggagatgtccattttctacgtcgtctactttgtggtgttccccttcttctttgtcaatatctttgtggccttgatcatcatcaccttccaggagcaaggggacaagatgatggaggaatacagcctggagaaaaatgagagggcctgcattgatttcgccatcagcgccaagccgctgacccgacacatgccgcagaacaagcagagcttccagtaccgcatgtggcagttcgtggtgtctccgcctttcgagtacacgatcatggccatgatcgccctcaacaccatcgtgcttatgatgaagttctatggggcttctgttgcttatgaaaatgccctgcgggtgttcaacatcgtcttcacctccctcttctctctggaatgtgtgctgaaagtcatggcttttgggattctgaattatttccgcgatgcctggaacatcttcgactttgtgactgttctgggcagcatcaccgatatcctcgtgactgagtttgggaatccgaataacttcatcaacctgagctttctccgcctcttccgagctgcccggctcatcaaacttctccgtcagggttacaccatccgcattcttctctggacctttgtgcagtccttcaaggccctgccttatgtctgtctgctgatcgccatgctcttcttcatctatgccatcattgggatgcaggtgtttggtaacattggcatcgacgtggaggacgaggacagtgatgaagatgagttccaaatcactgagcacaataacttccggaccttcttccaggccctcatgcttctcttccggagtgccaccggggaagcttggcacaacatcatgctttcctgcctcagcgggaaaccgtgtgataagaactctggcatcctgactcgagagtgtggcaatgaatttgcttatttttactttgtttccttcatcttcctctgctcgtttctgatgctgaatctctttgtcgccgtcatcatggacaactttgagtacctcacccgagactcctccatcctgggcccccaccacctggatgagtacgtgcgtgtctgggccgagtatgaccccgcagcttggggccgcatgccttacctggacatgtatcagatgctgagacacatgtctccgcccctgggtctggggaagaagtgtccggccagagtggcttacaagcggcttctgcggatggacctgcccgtcgcagatgacaacaccgtccacttcaattccaccctcatggctctgatccgcacagccctggacatcaagattgccaagggaggagccgacaaacagcagatggacgctgagctgcggaaggagatgatggcgatttggcccaatctgtcccagaagacgctagacctgctggtcacacctcacaagtccacggacctcaccgtggggaagatctacgcagccatgatgatcatggagtactaccggcagagcaaggccaagaagctgcaggccatgcgcgaggagcaggaccggacacccctcatgttccagcgcatggagcccccgtccccaacgcaggaagggggacctggccagaacgccctcccctccacccagctggacccaggaggagccctgatggctcacgaaagcggcctcaaggagagcccgtcctgggtgacccagcgtgcccaggagatgttccagaagacgggcacatggagtccggaacaaggcccccctaccgacatgcccaacagccagcctaactctcagtccgtggagatgcgagagatgggcagagatggctactccgacagcgagcactacctccccatggaaggccagggccgggctgcctccatgccccgcctccctgcagagaaccagaggagaaggggccggccacgtgggaataacctcagtaccatctcagacaccagccccatgaagcgttcagcctccgtgctgggccccaaggcccgacgcctggacgattactcgctggagcgggtcccgcccgaggagaaccagcggcaccaccagcggcgccgcgaccgcagccaccgcgcctctgagcgctccctgggccgctacaccgatgtggacacaggcttggggacagacctgagcatgaccacccaatccggggacctgccgtcgaaggagcgggaccaggagcggggccggcccaaggatcggaagcatcgacagcaccaccaccaccaccaccaccaccaccatcccccgccccccgacaaggaccgctatgcccaggaacggccggaccacggccgggcacgggctcgggaccagcgctggtcccgctcgcccagcgagggccgagagcacatggcgcaccggcagtagttccgtaagtggaagcccagccccctcaacatctggtaccagcactccgcggcggggccgccgccagctcccccagaccccctccaccccccggccacacgtgtcctattcccctgtgatccgtaaggccggcggctcggggcccccgcagcagcagcagcagcagcagcagcagcagcagcagcaggcggtggccaggccgggccgggcggccaccagcggccctcggaggtacccaggccccacggccgagcctctggccggagatcggccgcccacggggggccacagcagcggccgctcgcccaggatggagaggcgggtcccaggcccggcccggagcgagtcccccagggcctgtcgacacggcggggcccggtggccggcatctggcccgcacgtgtccgaggggcccccgggtccccggcaccatggctactaccggggctccgactacgacgaggccgatggcccgggcagcgggggcggcgaggaggccatggccggggcctacgacgcgccaccccccgtacgacacgcgtcctcgggcgccaccgggcgctcgcccaggactccccgggcctcgggcccggcctgcgcctcgccttctcggcacggccggcgactccccaacggctactacccggcgcacggactggccaggccccgcgggccgggctccaggaagggcctgcacgaaccctacagcgagagtgacgatgattggtgctaagcccgggcgaggtggcgcccgcccggccccccacgcaccccacgcacacaccccacccgaggagccgcgcagaggccgcgggggcccagcacagagggcccgggagagggccagccgggagaccccagactctggagaggccagggctgggccacaagggtgtcccgcagagaccctcggccaaaagagaccctcctgggcagccacggcgccccccaaccagccccgatccccccacccacgacaggggctctcgggtgggaggcagggagcagacaaaccacacagccaagggatttgaattaactcagccatttttggagaactttggggaacatgaaaaaaaaaaaaaaaaaaaaaaaaaaaaacatttttaaaagaaaaaacggggagaaaaaaatagcttctattgatgagttttatcatctcaattgaatctttcctttccctgatgaagacagctggtggccgagtgcggcaaagaagccagaaggaaccagaatcccagtgccctacacccaccaccagacacactcacacccacacacgttctcagacacacacaagagtgcttgccggttataccaaaccctactattactgcctgcagaaatcaatttaaaaaaataataataacaataaacaattttaaaaaggacaaaaaaattaatgattgagaaaagaggcatttttttctgacatttggtcctgcttgaaacaacaaaagaagaagaaaaacccaccatcaccaccgattcctttgcttcttttttccttttttcctaccttgtttgaaaaccgtgggcttgggactgtgaattattgcatgacattcaaaaagaaaaaaaaaataaaaaaaagttgaatcaaa

SEQ ID NO: 114 - DNA, 175000 bp, Homo sapiens
aacaaatcaccccagcactgtggcttggcagcacacatgtctagtcatagagttatatgtagttacgtgtagagccatatgtatcgtcacacgttctgtgggtcaggaatttggacccagcttaaccagctccacttctcgccagggttcagtcaaataccagctgcctcccacctgagagctcagccggggaagggtccctttccaatctcacgtggtgttggcaggatccagttcctcatggcctgctggactgagaacctcagttctcactgcctgttggccagaggccgcctttatgtcctcgccatgtgggcctctccaacatggcagctgacttcatcagagcatccatgccaagaaggcaacagagagggccagggagactgaagtcatacccttttgcgacctagtcatggggtgacattccatcacctttgcccattggttagaagcaggccaccaggtacagcccaagctcacggggaggggtcatacaagggtgtcaataccaggaggtgaggggtgctggggccatcttatgagtctgcccactgaggtaactaacaaccttgaggcctgacacagtggacaaaggcccttattaacagcagagaactgggaactttatttatttatttatttttgagacagagtctcactcttgtcacccaggctggagtgcaatggcatgatcttggctcactgcaacctccacctcccaggttcaagcaattctgcctcagcctccggaatagctgggactacaggcatgcaccactacacccggctaatttttgtatttttagtagagacagggtttcgccatgttggccaggctggtctcgaactcctgacctctggtgatctgcctgccttggcctcccaaagtgctgggattacaggcgtgagccaccgcacctcgctggaacttaatttttttagagacagtgtcgctctatcacccaagctggagtgcagtggtgcaatcctagctcacttgcagcctcaaattcctgggttcaggtgatcctcccacatcagcctcccaagaactgggaactaacagctgtttctctgctgtccttctcaagaaaagggaggctactgctaccccactggggacaatgctgggtttccctttaggacaggctctgagacaaggcggaggtgctgtttgtggccacagagcaggggactctgggttgcaggtgtggcctggctaaagtaggctttactgggctcctctctgcctgcatcaccccccggctgggcggttgtctctgaggccaaccttactccctgctgggcaggctggacagctgccctctccgtttgcccctctaccacccaaaaggcaggaggctctggagaccaggaccctgcccgccacggcctgtgtcccaggcgtgagggggtgccccacagacctctgctgagctgctgctgaatgacgccccttgggggtcctgccggaaggtcagagcaggggtgcactcccataaagaaacgcccccaggtcgggactcattcctgtgggcggcatcttgtggccatagctgcttctcgctgcactaatcacagtgcctctgtgggcagcaggcgctgaccacccaggcctgccccagaccctctcctcccttccggggcgctgcgctgggaccgatggggggcgccaggcctgtggacaccgccctgcaggggcctctccagctcactgggggtggggtgggggtcacacttggggtcctcaggtcgtgccgaccacgcgcattctctgcgctctgcgcaggagctcgcccaccctctccccgtgcagagagccccgcagctggctccccgcagggctgtccgggtgagtatggctctggccacgggccagtgtggcgggagggcaaaccccaaggccacctcggctcagagtccacggccggctgtcgccccgctccaggcgtcggcgggggatcctttccgcatgggcctgcgcccgcgctcggcgccccctccacggccccgccccgtccatggccccgtccttcatgggcgagcccctccatggccctgcccctccgcgccccacccctccctcgccccacctctcaccttcctgccccgcccccagcctccccacccctcaccggccagtcccctcccctatcccgctccgcccctcagccgccccgcccctcagccggcctgcctaatgtccccgtccccagcatcgccccgccccgcccccgtctcgccccgcccctcaggcggcctccctgctgtgccccgccccggcctcgccacgcccctacctcaccacgccccccgcatcgccacgccccccgcatcgccacgcctcccttaccatgcagtcccgccccgtcccttcctcgtcccgcctcgccgcgacacttcacacacagcttcgcctcaccccattacagtctcaccacgccccgtcccctctccgttgagccccgcgccttcgcccgggtggggcgctgcgctgtcagcggccttgctgtgtgaggcagaacctgcgggggcaggggcgggctggttccctggccagccattggcagagtccgcaggctagggctgtcaatcatgctggccggcgtggccccgcctccgccggcgcggccccgcctccgccggcgcagcgtctgggacgcaaggcgccgtgggggctgccgggacgggtccaagatggacggccgctcaggttctgcttttacctgcggcccagagccccattcattgccccggtgctgagcggcgccgcgagtcggcccgaggcctccggggactgccgtgccgggcgggagaccgccatggcgaccctggaaaagctgatgaaggccttcgagtccctcaagtccttccagcagcagcagcagcagcagcagcagcagcagcagcagcagcagcagcagcagcagcaacagccgccaccgccgccgccgccgccgccgcctcctcagcttcctcagccgccgccgcaggcacagccgctgctgcctcagccgcagccgcccccgccgccgcccccgccgccacccggcccggctgtggctgaggagccgctgcaccgaccgtgagtttgggcccgctgcagctccctgtcccggcgggtcccaggctacggcggggatggcggtaaccctgcagcctgcgggccggcgacacgaacccccggccccgcagagacagagtgacccagcaacccagagcccatgagggacacccgccccctcctggggcgaggccttcccccacttcagccccgctccctcacttgggtcttcccttgtcctctcgcgaggggaggcagagccttgttggggcctgtcctgaattcaccgaggggagtcacggcctcagccctctcgcccttcgcaggatgcgaagagttggggcgagaacttgtttctttttatttgcgagaaaccagggcgggggttcttttaactgcgttgtgaagagaacttggaggagccgagatttgctcagtgccacttccctcttctagtctgagagggaagagggctgggggcgcgggacacttcgagaggaggcggggtttggagctggagagatgtgggggcagtggatgacataatgcttttaggacgcctcggcgggagtggcggggcagggggggggcggggagtgagggcgcgtccaatgggagatttcttttcctagtggcacttaaaacagcctgagatttgaggctcttcctacattgtcaggacatttcatttagttcatgatcacggtggtagtaacacgattttaagcaccacctaagagatctgctcatctaagcctaagttggtctgcaggcgtttgaatgagttgtggttgccaagtaaagtggtgaacttacgtggtgattaatgaaattatcttaaatattaggaagagttgattgaagttttttgcctatgtgtgttgggaataaaaccaacacgttgctgatggggaggttaattgccgagggatgaatgaggtgtacattttaccagtattccagtcaggcttgccagaatacggggggtccgcagactccgtgggcatctcagatgtgccagtgaaagggtttctgtttgcttcattgctgacagcttgttactttttggaagctaggggtttctgttgcttgttcttggggagaatttttgaaacaggaaaagagagaccattaaaacatctagcggaaccccaggactttccctggaagtctgtgtgtcgagtgtacagtaggagttaggaagtactctggtgcagttcaggcctttctcttacctctcagtattctatttccgatctggatgtgtcccagatggcatttggtaagaatatctctgttaagactgattaatttttagtaatatttcttgttctttgtttctgttatgatccttgtctcgtcttcaaagtttaattagaaaatgattcggagagcagtgttagcttatttgttggaataaaatttaggaataaattattctaaaggatggaaaaactttttggatatttggagaaattttaaaacaatttggcttatctcttcagtaagtaatttctcatccagaaatttactgtagtgcttttctaggaggtaggtgtcataaaagttcacacattgcatgtatcttgtgtaaacactaaacagggctcctgatgggaaggaagacctttctgctgggctgcttcagacacttgatcattctaaaaatatgccttctctttcttatgctgatttgacagaacctgcatttgcttatcttcaaaatatgggtatcaagaaatttcctttgctgccttgacaaaggagatagattttgtttcattactttaaggtaatatatgattaccttatttaaaaaatttaatcaggactggcaaggtggcttacacctttaatccgagcactttgggaggcctaggtggacgaatcacctgaggtcaggagtttgagaccagcctggctaacatggtgaaaccctgtctctactaaaaatacaaaaattagctggtcatggtggcacgtgcctgtaatccaagctacctgggaggctgaggcaggaaaatcgcttgaacccgggaggcagagtctgcagtgagttgagatcacgccactgcactccagcctgggtgacagagcgagactctatctcaaaaaaaattttttttaatgtattatttttgcataagtaatacattgacatgatacaaattctgtaattacaaaagggcaataattaaaatatcttccttccacccctttcctctgagtacctaactttgtccccaagaacaagcactatttcagttcctcatgtatcctgccagatataacctgttcatattgtaagatagatttaaaatgctctaaaaacaaaagtagtttagaataatatatatctatatattttttgagatgtagtctcacattgtcacccaggctggagtgcagtgatacaatctcggctcactgcagtctctgcctcccaggttcaaatgcttctcctgcctcagccttctgagtagctgggattacaggcgcccaccaccatgtccagctaatttttgtatttttagtagagatggggtttcaccatgttggccaggctggtcttgaactcctgaccttgtgatctgtccacctcggcctcccaaagtgctgggattacaggtgtgagccaccatgcctggctagaataataacttttaaaggttcttagcatgctctgaaatcaactgcattaggtttatttatagttttatagttattttaaataaaatgcatatttgtcatatttctctgtattttgctgttgagaaaggaggtattcactaattttgagtaacaaacactgctcacaaagtttggattttggcagttctgttcacgtgcttcagccaaaaaatcctcttctcaaagtaagattgatgaaagcaatttagaaagtatctgttctgtttttatggctcttgctctttggtgtggaactgtggtgtcacgccatgcatgggcctcagtttatgagtgtttgtgctctgctcagcatacaggatgcaggagttccttatggggctggctgcaggctcagcaaatctagcatgcttgggagggtcctcacagtaattaggaggcaattaatacttgcttctggcagtttcttattctccttcagattcctatctggtgtttccctgactttattcattcatcagtaaatatttactaaacatgtactatgtgcctggcactgttataggtgcagggctcagcagtgagcagacaaagctctgccctcgtgaagctttcattctaatgaaggacatagacagtaagcaagatagataagtaaaatatacagtacgttaatacgtggaggaacttcaaagcagggaaggggatagggaaatgtcagggttaatcgagtgttaacttatttttatttttaaaaaaattgttaagggctttccagcaaaacccagaaagcctgctagacaaattccaaaagagctgtagcactaagtgttgacatttttattttattttgttttgttttgttttttttgagacagttcttgctctatcagccaggctggagtgcactagtgtgatcttggctcactgcaacctctgcctcttgggttcaagtgattctcatgcctcagcctcctgtttagctgggattatagacatgcactgccatgcctgggtaattttttttttttcccccgagacggagtcttgctctgtcgcccaggctggagtgcagtggcgcgatctcagctcactgcaagctccgcttcccgagttcacgccattctcctgcctcagtctcccaagtagctgggactacaggcgcctgccaccacgtccagctaatttttttgtatttttaatagagacggggtttcaccgtgttagccaggatgatcttgatctcctgacctcgtcatccgccgaccttgtgatccgcccacctcggcctcccaaagtgctgggattacaggcatgagccactgtgcccggccacgcctgggtaatttttgtatttttagtagagatggggttttgccatgatgagcaggctggtctcgaactcccggcctcatgtgatctgcctgccttggcctcccaaagtgctaggattacaggcatgagccaccatacctggccagtgttgatattttaaatacggtgttcagggaaggtccactgagaagacagctttttttttttttttttttggggttggggggcaaggtcttgctctttaacccaggctggaatgcagtatcactatcgtagctcacttcagccttgaactcctgggctcaagtgatcctcccacctcaacctcacaatgtgttgggactataggtgtgagccatcacacctggccagatgatggcttttgagtaaagacctcaagcgagttaagagtctagtgtaagggtgtatgaagtagtggtattccagatggggggaacaggtccaaaatcttcctgtttcaggaatagcaaggatgtcattttagttgggtgaattgagtgagggggacatttgtagtaagaagtaaggtccaagaggtcaagggagtgccatatcagaccaatactacttgccttgtagatggaataaagatattggcatttatgtgagtgagatgggatgtcactggaggattagagcagaggagtagcatgatctgaatttcaatcttaagtgaactctggctgacaacagagtgaaggggaacaccggcaaaagcagaaaccagttaggaagccactgcagtgctcagataagcatggtgggttctgtcagggtaccggctgtcggctgtgggcagtgtgaggaatgactgactggattttgaatgcggaaccaactgcacttgttgaactctgctaagtataacaatttagcagtagcttgcgttatcaggtttgtattcagctgcaagtaacagaaaatcctgctgcaatagcttaaactggtaacaagcaagagcttatcagaagacaaaaataagtctggggaaattcaacaataagttaaggaacccaggctctttcttttttttttttttgaaacggagtttcgctcttgtcacccgggctggagtgcaatgatgtgatctcagctcactaaaacctctacctcctgggttcaagtgattcttctgcctcagcctcccaagtaactgggattacaggcgtataccaccatgcccagctaatttttgtgtttttagtagagatggggtttcaccatgttggccaggctggtctcgaacttctgacctcaggtgatccactcgcctcagcctgccaaagtgctgggattacaggtttgggccactgcacccggtcagaacccaggctctttcttatacttaccttgcaaacccttgttctcattttttccctttgtatttttattgttgaattgtaatagttctttatatattctggatactggattcttatcagatagatgatttgtaaaaactctcccttcctttggattgtctttttactttcttgatagtgtcttttgaagtgtaaaagtttttaattttgatgaagtcgagtttatctattttgtctttggttgctgtgcttcaagtgtcatatctaagaaatcattgtctaatccaaagtcaaaaaggtttactcctatgttttcttctaagaattttagagttttacatttaagtctgatccattttgagttaatttttatatatggttcaggtagaagtccaactttattcttttccatgtggttattcagttgtcccagcactgtttgttgaagagactattctttccccatggaattatcttagtacccttgttgaaaattaatcgtccttaattgtataaatttatttctagactgtcagttctacctgttggtctttatgtcgatcctgtgccagtaccatacagtcttgattactgaagtttgtgtcacagtttaaattcatgaaatgtgagttctccaactttgttccttttcaagattgatttggccatgctgggtcccttgcatttccgtacgaattgtaggatcagcttgtcagtttcaacaaagaagccaagtaggattctgagagggattgtgttgaatctgtagatcaacttggggagtattcgcatcttaacaatattgtcttccacctatgaacatgggcaaactttgtgtaaatggtcagattgtaagtatttcgggctgtgtgggcacagtgtctctgtcacagctacgcggctctgccattgtagcatgaaagtagccataagcaatatgtatgagtgtctgtgttccaatagaattttattaatgacaaggaagtttgaatttcatataattttcacctgtcatgagatagtatttgattattttggtcaaccatttaaaaatgtaaaaacatttcttagcttgtgaactagccaaaaatatgcaggttatagttttcccactcctaggttaaaatatgataggaccacatttggaaagcatttctttttttttttttttttttttttttgagacggagtttcactcttgttgcccaggctggagtgcagtggcgcgatctcggctcactgcaacctctgcctcccaggttcaagacattctcctgcacggcctccctagtagctgggattacaggcatgcgccaccacacccagctaattttgtatttttagtagagacggggtttctccatgttggtcaggctggtcttgaactcctgacctcaggtgatccacccgcctcagcctcccaaagtgctgggattacagggtgtgagccaccacaccctgctggaaagcatttcttttttggctgtttttgttttttttttaaactagttttgaaaattataaaagttacacatatacattataaaaatatcttcaagcagcacagatgaaaaacaaagcccttcttgcaagtctgtcatctttgtctaacttcctaagaacaaaagtgtttcttgtgtcttcttcccagattttaatatgcatatacaagcatttaaatgtgtcattttttgtttgcttgactgagatcacattacatatgtatttttttacttaacaatgtgtcatagatattgttccatagcagtacctgtaattcttattaattgctatgtaatattttagaatttctttttaaaagaggacttttggagatgtaaaggcaaaggtctcacatttttgtggctgtagaatgtgctggtgacatattctctctaccttgagaagtccccatccccatcacctccatttcctgtaaataagtcaaccacttgataaactacctttgaatggatccacactcaaaacatttagtcttattcagacaacaaggaggaaaaataaaataccttataaagcactgtttaatattgtattaaattggatcaatttgggggctagaatgtatgttagagacatgatatgtccataggtccttgctatcacagtgaggtctcagggacagtcgtttggtatcatttgggatctcataagcagactctctctgcttgacctgacaaatcagagtctgtgttttaacaggttcagtgagtgacttacatgcacattggagtttgggaagctccactgtaggtgcttagaccttacctttgttgttgctaataacaatgcaagcatttgggaggaagacctgtgttgctcatatgtgtccaggtgtagctgaggtggccttgcttatctgctgtagggccgttgagcatttctgtagctgtgatgagtgagctgaggtgagcctgcggagagctcccagccattggtagtgggactcgcttagatgaactggaaggaccctttcatctgagcagccactatggagaaaaacaaccgaatgaggggagagacaatgtgcaattttatttagggcacaaaggagagctgtggttagaaggtgacatttgagtggaaagggggcaagccatgtgtatagcgggagaagagaggtccaggcagagttaacagaaggcagaaatgctttccatgtttgagaaccagtaaggaggccagtggctgaagtaaggtgaagggcagaaataaggatgaggctgcgagagatgagaggttagagacgagcgtcttgtgcaccaagataagcttgtgtggtcaaaacaagtagtttaatttatgtttttaaaagatcattttggctgggcacaatggttcatgcctgtaataccagtagtttgagacggtgtggtgggaggattgcctgaggccagacgaccagcatagccaacatagcagcacctataaggtctctacaaaaaactttaaaaaattagctgggcatagtggtgtgtgcctgtagtcccagctactcaggaggctgaggaggctggaggattgcttgagtccaggagtttgaggctgcagtgagctatgattatgccactacactacaacctgggcaagagagtgagaccctgtctctaaatatacacacacacacacacacacacacacacacacacacacacacacacacacacacacatatatatgtatatatatgcatttagatgaaaagatcactttgacaataccacatgctggtgaggatttagaaaaactaggtcacttattgctggtgggaatataatatagtacggccactctggaaaacagtttggcagtttgtcataaaactgaacataccgttagtatacagcccagcagcaactacaatcctgggcattaatcctagagaaatgaaaccttaatgttcacataaaaacctatactcaagtatgcatagcagctttacccataatatctaagaactggaatcagctcagatgtccttcaacaggtgaatggttaaactactcagtaataaaaaggaatgagctactgatagcatgcaacagtttaggtgaagttatgctaatgaaaaaagccaatcccaaaaggttatacatactgtatgattctatgtttttttgcaatggcacagttttagggatggagaatagattagtggttgcctggggttagagatggggtagtagagtaggttagtggtggcagaggagagaaaagagagggaggtgaatgtggttataaaaggacaacacaggggaatacttgtaatggaaatgctttgtctttttttttttttttttttttttggcgacagagtcttgctctgttgcccaggctggagtgcagtggcatgatcttttctcactgcaacctctgcctcctgggttcaagtgatacttgtgtctcagtctcccatgttcagagtgaaacaaaccagaggtaatgttcatccaaataatccaacacacatgacattaaaacatcaagatcaggtcggacgtggtggctcatgcctgtaatcccagcacttttgggaggccaaggtgggcagatcacttgaggtcaggagttcgagaccagccgggccaacatgatgaaaccccatcttgactaaaaatacaaaaattagccgggcatggtggtgtgcacctgtagtcccagctacttgggaggctgaggcaagagaactgcttgaacccgaggggcagaggttgcagtgagctgagagtgcgccattgcacttcagcctgtgtgacagagtaagactccatctccaaaaaaaaaaaaccaagatcaattaaaatacagcattactgggccgggtgtggtggctcacacctgtaatcccagcactttgggaggccgagatgggcagatcacgaggtcaggagatccagaccatcccggctaacacggtgaaaccccgtctctactaaaaaatacaaaaaattagccgggtatagtggtgggtgcctgtagtcccagctacttgggaggctgaagcaggagaatggtgtgaacccgggaggcagagctggcagtgagctgagatcgcgccactgcactccagcctgggcgacagagcaagactccgtctcgggggaaaaaaaaaaataaataaatagaatgctgtagtgtccttgagtttacatgcccctccttacgcttgtgtgcccgtgcagattgcttgattacacaattagaggaggctggcggaggattgttttaatttttttttttttgagacagtctggctctgttccccaggctagagtgcaatggcgcaatcttggtgcactgcaacctctgcctcctgggttcaagcagttcttctgccgcagcctcccgagtagctgggattataggcgcccgccaccacgcccaactattttttgtatttttagtagagcagcgtttcaccatgctggccaggctggtctcgaactcctgacctcagatgatctgctgccccagcctcccaaagtgctgggattacaggcgtgagccacacctggccgtttgttttaattttgaaggtgaagtgaaagtgactacatttaccaaaagtgattgaaaagccaggactgttcttaccctgtttttccagttcttgctcagagcaaggtggtttctttttcacttaatcaccatacttacttttcatgtagaacaagtcagtttgagttatcagttcatcatcttaactaaattccatgggggaaggaattagttttagtttcttaaacttccaggtttgcttattggacaaaatgagatagcaaggcagtgtttttaagttagattttttatttctttggtaatacaattttctcagaaacttagtagtcttttagtttagttgtttttagttggtcctatgttttggatcacccctctctactttattttgatagtgccaactgtgaagacatctgaagccataggtttggatgggaaggaggcatctttagcctgatcatcttcgccaggctgtttatctccttttgcttggctgagaagtcttaataggaggcttattcccagctatttggggacatagaagcagttagccattgcttatattttactgaggtctgtgtggtatgttgattgtagtcagttaacgattttgagaactgaaggcagcctggtatatatagagtaggtattagactgtgtttcttctaattgaatttcccatctcttgtaatctatgccatcatcttctgtactgctgagaaagaaagaaagtttctaatcaaactataccactggttgtaagatgcagtttggctttagtgatgttaacacatgattcaaacgtgaaattgattgagtattggtgaaatacagaggagatttaaagccagaagacctgggtttaaatgctggctgtatgacttcatatctgtgtgatcttgggcatgtcatggttggcacttcaatttcttctctctataatgggggaagtgaggccagtcatggtggctcatacctataatcccagtgctttgggaggccaagatgggaagatcgcttgaggccaggagtttgagcaattgggcaacatcgtgaggccccgtctctacaaaatattttgaaaaaattagccaggcccagtggtgcgtgcctgtggtccgcgccactcaggaggctgagacgggaggatcctttcagcctaggagtttaaggctaaagtgagccatgattgtgctatcgtactccagcctgggcagcagagcaagatcctgactctaaaaaaaagtaaaataaagtaaaatgggggaaatgaactgctttagtaacatcatctgttttttctgtgagcagcgtagcttgacagccattggtgaactcgtgccctgtgcttccctgtccagatccccattctgcccgcaacatggagtataacggtttattcatagtagtcgagaaacactcactgaatgaatgaatgaggtgtagaactaagtggagtgggtaattcaacacatattaatttccttcttttttttatttttagaaagaaagaactttcagctaccaagaaagaccgtgtgaatcattgtctgacaatatgtgaaaacatagtggcacagtctgtcaggtaattgcactttgaactgtctagagaaaataagaactttgtatattttcagtcttaatgggctagaatattctttgtgtcccagctattttaaatggattcagaaatccatttaagatgaagaaggacccttttcccatatttctggctatatacaaggatatccagacactgaaatgaataatgttccctttttgtaatcttttatgcaaaaattaaaaccattatggtaattgaacaacatgtttatgtttagttaacacccttagcaactatagttattttaaaaccatctatggtttgatatttttgcatttgttgcaatagtaggaacagcacaagacagttcagtttgtctctcttatttgctttttcttggcagtttgctgtcctattgtacctctgctcctagcagtggctggagcccactcctctgtgcttcgggattagtggggatcgtggggcattgactgtaggtcagctttccttgcttgatctttctcactgggatgaactagcagcaccttcttttgtagctgctttgcttttgactatctttctgaccgttgttcctagtagctgtagatggtaaatatatttaggcctgtttccaatggctcagtaggagacatattcacctatgatatctgaattctgttacccacatgggcatgcgtgaaatagttgccttgccttactttcccttggaataaataattcatgttattctcctggtagaagctagaaaaagcctttatagtcagtcagaaaaaaatttttagacaaataatcttgattttagtactgacaaaaacgtgtggtgattctttttttaatttttttttgagacggagtttcactcttgttgcccaggctggagtgcaatggcgtgatctcggctcactgcaacctctgcctcctgggttcaagtgattctcctgcctcagcctcccaagtagctggagttacaggcatgtgctactgtgcccagctaattttgtatttttagtagagatgttggtcaggctgatctcgaactcccaaccttaggtgatctgcccgcctcagcctcccaaagtgctgggattacaggcgtgagccagggcgcccggtgattcatttgttttttcaaaaaatttcctcttggccattgcttttcacttttgttttttttttttttttgagacggagtcacgatctgtcacccaggctggagtgcagtggcatgatcttggcttactgcaagctctgcctcccaggttcacgccattctcctgcttcagcctggcgagtagctgggactacaggtgctcgccaccacacccggctaattttttgtatttttagtagagatggggtttcaccgtggtcttgatctcctgacctcatgacccgctcaactcagcctcccaaagtgctgggattacaggcgtgagccaccgcgcccggccctctcttgtctttttattgtggtaaaatgcacataaaattgactgtcttaaccatttttaggggtacagttcagtatatatattcgtaatgttgtacagccatcactgccatctacttcataagtttttcttctgtcaaaactgaacatctgtcttcattaaactccctatcatccattctttcctgtagtccctttctactttctgtctgtatgagtgtaactgctctggagacctcatgtaagtggattcctacaggatttgtgttttttttttggtgatctgcttatttttaatgcctctgtgcatttgtattatatactttcaaagtgatttcacaaaaccgtttcattttaggttaactcatttctgttgtttgtgaaatactgtgtatgattctgttctgtttctgtctaatttgtggaaatgttgtgggaagaaaatgaaataacaaatgagcatatgtcctgaaaataaaaatataaaaattctaagttagcatgctattgtagaatacaacgctatgataaaagtaggaaaaaaaaaggtttgaattctatctctgctacctgtgtaagctgggtgactttagataagctgtaacgtgtttgagccttactggctcatttttgaaatgtaatccctagttacacagttcttgtgggatcagatggtacatgtgaaacactgtgaaaaagcaactgcatagatatgttcattagccacctgagcgggaagcgtatcccattgcgatgcccatcatccaaagctatatgttatctttacttttttttttttgagacagagtcttgctctgttgcccaggctagagtgcagtggtgcaatctcagctcactgcaagctccacctcccgggttcacgctattctcctgccccagcctcccaagtagctgggactacaggcacccgccaccatgcctggctaaatttttgtatttttagtagagatggggtttcaccgtgttagccaggatggtcttgatctcctgacctcgtgatccgcccgcctcggcctcccaaagtgctgggattacaggcgtgagccactgcccctggccatctttactttttttgtgaaatgactttaaatacttggcaaacatttggtcattgttcatctgatctccaccatccaggtctcagagaacataatttctctctgaaagcttattgacccaggaaataagatctctttcaatctgagtgcgtcaggctttattcttgtcattttgtcttttgataattttcaaatggaattcatggaatgttggcttatattcatatattagtaaagtatgttgagacatcttaagattgatttgtggttctatatgccatattaaatcaaaataatagctgttaatggttttcacattagtctgtctcttgtttttatggagtaatgctgagagttcattatgcttgttctacagaagagcatgttaaaaggagtttttggagtcagagaggttattcttggtttcataggatacactctatactttttagggatttcagagtatatagctgaaggtgatattttatgtaaatatgttttatggaaacttattgctcatcgctgtttcctgttaactctcctaaaatataattaaacttttggaacttttttatagcttttgtgctagactaatttttgtctctaatgaggttatataaatggcagcttctgacgttttcaatgtaggaagtcatttaaaacttcatgtatattgtgaaaatgtagtctgctttaagctctctaaagtggtctaagttactggttcctaagtatggatgagcatcaaaatcatctggaaaatttgttaaaaatacagtaatgaaggcacctcactgtcctttttcccaaacatacttctgcattctgtttgagtaggtagggactacacatttttcacaagtatcctcttgggaatacccaggaatgcttacttgagcaacctcttactaatatgtaccttgataaggtggctaggtaaacataaatatacaaaaatccatagatctcccatatattagcataaatcagctagaaaatataacgtttaaagatctagttcacagtagcaccaatatatcgaactctaaggaatcgataaatatgcaaaaactttataaaaacttctgttaatgtttctgaaagatataggtgaccactttctagataggaagattttatattactaagttgaattttctctaaattaacacagaaatttaaaataatcttgatcaaaattctagtagaggtatttttgaacttgttcactgcaagaataaatacataattgcaaagaatatctcaaaatcatcaccaggcctggtgtggtggcccatgcctgtaatcccagcactttgggaggctgaggcaggcagatcacctgaggtcaagagtttgagaccagctggaccagtgcggtgaaacactgcctctactaaaaatacaaaaattagctgggtgtggtggtgcatgcctgtagtcccagctacttgggaggctgaggcaggagaattgcttgaacccaggaggtacaggttgcggtgagcctagatcgcaccactgcattccagcctgggcgacaagagcaaaattctgtctcaagaaaaaagagaaaaaagaaaaagaaatcaacactaatatggtgagacttaatgtatgtgacattaaaatagtgattggatgttaaaacaggtatagaacagaaagaagagtgtatgtgtgtatctgtatgaatttatgatgggtgtaacatatatgtattagggaaatgagggaaatgatacatttctctgactttgggagaacattatatctctacctcatattgcaaacaaacataaagttcagattaattacctaaatgtgaaaaaatgaaataatttctttaaaaaatgtaatcttagtttgaggaaggttaacattataaaggaaaaaactgttttgagtggaatatagttcaatatgtcaaaatccaccttcaacaaaattgaaagtaaattgaacttggggaaagtattgacagcatatagatcaaaggttactagcctgtgtaaagagcagttataaatatcgttaagaaaaacactgtcgacctgtcggcaccttgttctccgactcccagcctccagaactgtgacgagtaagtgcttattgtttaaaccacccagtctgtatgtggtattttgttatagaaactcaagctgattaggacactagtaatcagtagactgaaactgaaacaaaaataagaaccttttttacctgtcaaattggcaaacattaagaatattcagatttttgtcagaggtgatacaaccttctaagaaggcaatttgggaaaatataaagctttagattattatatgtctgacctagcagttttacctctagggtgcttacccctaggaaagtgtgtaatgatattggtgcagtgcccttcatcccattagaaaattaaaaataaccttaatggcctaccactaaaaggggattgaaaatttaagatatatttatttatgtgtttattgagatggagtcttgcactgtccgcctgggccagagtgcaatggtgcgatctcggctcactgcaacctctgcttcccgggttcatgtgattctcctgcctcagcctcctgagtagctgggattacaggctcacaccaccgcacccggctaattttttgtatttttagtagagatggggtttcactgtgttggccagactggtctcgaactcctgacctcatgatccgcgcccctcggcctcccagtgttgggattacaggtgtgagccactgcgcctggccagatacatttatacaagagaatgttagttaacattcatagatatttatattttgtttactttttattaaaaaaattttttttagagacaggatcttactctgtcacccaggcaggatgcagttgcacaatcatagcccactgcagcctgaactcctgggcttaagtgatccttctgcctcagccttttgagtacctgggggactttaggcagtgctactatacctggctaatttttaaatgttttatagatgagatcttgctgtattgcccaggctggtctagaattcctgggcccaagtgatcctcccaccttggcctcccaaagcgctgagattacaggcatgagccaccacttctgaccaatagatatttatatttgtgactggaaaatatattaacaatgtgttaaaaaattcagttaaaaaataatgaaagatttttgcttctggctaagatagaataacaaggacagcatttatcttcttgccttgaaatagttgaaaacggaagaaatatatgtaacagtggttttcaagttattgggcatcaggcaaagaagaatagttatcccaggaaaatgaatgtggagagccctacaatttccttacattactgcctggtcatggcaagaggaaaaactgagaggagactgaggctgagccagtggtttgctgggttgaggaggcagagctgggagtgcagagatgcaaggtggtgagagcccatatggaagaataccagggaagagagctgcagagggagctccggagacctgcaccctgccctctcagtaccctgtcatgtgtgtagctgagtactgacgagcacttgcttgtgcggaaatgacccagggctggaggtagagccacctgaaaggattagaaggaacagttgctgaaagtcacacagggccaggaagaatttctaatcacaccagttggagtggaaaacctcagctctcatagagcaggtagggtactcagaagggtttgcccacctagccccagactaagtttcgttactctgaccctacctaatattaaaaagagattaattaaattgttcgcaacaaaaataatatatttcagtgtttgtaacacgtagaagtgaattgtatgacaatagcataaaggctggaagagcagaaattgacatgtatttgcgctgggcagaataatgctcccctctttccccaaaagatatcaagtcctaatccctggagcctgtaaatattactttatatggaaaattgttttatgatgtgattaaattcaggatcttgagatgagggggctatcttggatgatctgggtaggcactaaatgcaatcacatatatataaaaaggaggcagagggagattttacacacagagagaaggccctgtgaagatggaacagaaagatttgaaggtgctggccttgaaaattggagtgatgaagctataagccaaggaatgcagcagccaccaaagctggaagaggcacggagcagttctcatttagagcctactccagagggaatgtggtgctgccaattccttttttttttttttttttaagatatcatttacccctttaagttggttttttttttttttttttttttttagtatttattgatcattcttgggtgtttcttggagagggggatttggcagggtcataggacaatagtggagggaaggtcagcagataaacatgtaaacaaaggtctctggttttcctaggcagagggccctgccacgttctgcagtgtttgtgtccctgggtacttgagattagggagtggtgatgactcttaacgagtatgctgccttcaagcatctgtttaacaaagcacatcttgcaccgcccttaatccatttaacccttagtggacacagcacatgtttcagagagcacggggttgggggtaaggttatagattaacagcatcccaaggcagaagaatttttcttagtacagaacaaaatggagtgtcctatgtctacttctttctacgcagacacagtaacaatctgatctctctttcttttcccacatttcctccttttctattcgacaaaactgccaccgtcatcatggactgttctcaatgagctattgggtacacctcccagatggggtggcggccgggcagaggggctcctcacttcccagatggggcggccgggcagaggcgccccccaacctcccagacggggcggcggctgggcgggggctgccccccacctcccggacggggcgggtggccgggcgggggctgcccaccacctcccggacggggcggctggccgggcgggggctgccccccacctcccggacggggcgggtggccgggcgggggctgccccccacctcccggacggggcggctggccgggcgggggctgccccccacctcccggacggagcggctgccgggcggaggggctcctcacttcccggacggggcggctgctgggcggaggggctcctcacttctcagacggggcggctggtcagagacgctcctcacctcccagacggggtggcagtggggcagagacattcttaagttcccagacggagtcacggccgggcagaggtgctcttcacatctcagacggggcggcggggcagaggtgctccccacttcccagacgatgggcggccgggcagagatgctcctcacttcctagatgggatgacagccgggaagaggcgctcctcacttcccagactgggcagccaggcagaggggctcctcacatcccagacgatgggcggccaggcagaaacgctcctcacttcctagacggggtggcggctgggcagaggccgcaatcttggcactttgggaggccaaggcaggcggctgggaggtgaaggttgtagtgacccgagatcacgccactgcactccagcctgggcaacactgagcactgagtgagcgagactccgtctgcaatcccggcacctcgggaggccgaggctggcagatcacttgcagtcaggagctggagaccagcccggccaacacggcgaaaccccgtctccaccaaaaaacacgaaaaccagtcagacatggcggtgcgtgcctgcaatcccaggcacttggcaggctgaggcaggagaatcaggtagggaggttgcagtgagtagagatggtggcagtacagtccagccttggctcggcatcagagggagactgtgcgagggcgagggcgagggcgagggaattccttaatttcagtttagtgatactaattttggactctggcctctaaaactgtgaaagaaaaaattttttgtttgtttgtttcttttaagccacatagtttgtggtaatttgttacagcagctgcaggaaactaatttatgctgcatgtgaaatggtgtaataaggtagattgtgatgaagatacatagtataaacaattaagcaacaactaaaagcacaacaaggaattatagctaatgaaccaaaaaaggagattagaataataaaaatggtgaatcccaaagaagccagaaataggggaagaggcaaataaaggaaagaaagagcttgatggtagatttcaacctaactatgtcaaaaaggacattacatgtaaaaggcagcgatttttcagattgaatggaaaagtaagactcggtatatgctgctgcctgcaagaaacacattctaaatataaaggcaaaaataacctacaggtaacagaacggaaagaagttcactgtgcttacaagaattagatgcaagctagactggttctgttaatatcagacaaagtggatttcaaagcaaaggctcttgcccaggatgagatggtcatttcataatgatgaaggggattcgttcatcagcctggcatagcaagctgaaatgtttatgcaccggactacagagctaaaatacatgaagcaaagcctgacagaactacaagtagaaacagacaaatccacagtgatagagatttcagtagccgctctcaatgatttgtagaacacgtagccataatatctggatctagaacacttgaccaacactgtcccctgtgcaacctcattggcatttacaggacactccacccagcaccagcagaagagacactctctcaagtgctcacagaatgtttgccaagatagagcagatgctgggccataaaacaagtctctaaattaaaagcattcaaattattcagagtatgttttctgacctcagtatcattaagttggaatatattataggaagataacctggaaaagcctcagatatgtggaaaaacccatttccacatggcccatgggtcagaagtgaagtcaaaagggaaatttgaaagtcttttggattgactgatataaaaacaatagatttctaaacttgtggggtgctgttacagcatagtaaatggaaatttctagcattaaatgcctgttttaggaaagaaagatttcaaatcaatgacctcagcttctacctttggaaacttgaaaatgacaagcaaatggaatccagagttaccagaagggccaggtacggtggcttatgcctgcagttctgccactttgggaggccgaggcaggtggattgtttgagactggcagttgaagaccagcctgggcagcctagggagaccccatatctacaaaaaacaaaaaaattagccaggtgtggtggcatgtgcctgtagtcccagctaaccaggagtctaaggtgggaggattgcttgagtctgggaggttgaggctgcagtgaactgtgattgtgccactgtgttccatcctgggcaacagaatgagaccctgtctcaaaaacaaaaacagttactagaagaatggacatcataaagataggagcagaagtcagtaaaatagaaaacaaaaatacataggaaatcaataaaaccaaaagctggttcatcaagaacatcaataaattggtaaagctgataggaaaaacagtgaagtcacaaattagcaatatcaggaatgagggagatgacagtagtatagattatatagatattaaaaggactgtatgaggcaggtgtggtggttcacgcctgtaatcccagcaccttgggaggccgaggtggacagatcacctgaggtcaggagtttgggaccagcctggccaacatggtgaaactctgtctctactaaaaatacaaaaattagttggtcgtggtgctgtgtgcctgtaatcccagctacttgggaggctgaggcaggagaattgcttgaacctgggaggcggaggttgcagtgagctgagattgtgccgttgcactccagcctgggtgacagagcaagactccatctcaaaacaaataaataaataaaaaggactatatggtaatattatgaacaactttatgccaataaatttgacaacttatagatgaaatggatgagttccttgaaagacacagaaactattaaagctctctcaagaagatatagataagctgattagccctatatctattttattgaatttaaatgtaaaaatcaatatttagttactggaaaacttttaagtgtggttggaaatggtatacgaactttttcaactgaattttatgaagtctaatcacaggtaaaggttttctgatgaaaatttagtgtctgaattgagatatactgtaaaaaatgttatatatcttaattatttcttcacattaattacatgttgaaataatactttgggtgtattgggttaaattaaatattatgaaaatcttgcctgttttctttttacttttgatgcgtcagctaggaaatataaaagtgtagctcacattctgtttctgttgacagtactgctttggagcacagtgtttgaatgatctatcatttcaaagacctttcctcagttcgttattcatggctgtctgtattccacatagataaggtctgaaatactgctaagtggcatgttttgttttatgcttttataagtttgttgatcattactgatgtggacttttggtgcctcttaggctcattgctatcttccaaccattgtttgcaatttttacctagagataaagagaaagagacatttggtttcagagtagttagattgggatcatgaaagagcaacctcattttgatgcttcaaaaatagcacatcccccgtattactgggatttgctattcttgggattacttcaagaacatccttgtgttactggtttggatgcttctgaatgctgtgaagtcagtttcatgtacatggctcatcagtttagctctctcttggctttgtttagacagttggagcatgatggcctaaacagcttctttcaattaaacattttaaaatagtttacaaatagtaaacaaactccagtttttgtgactctttgtctcgcacaacaaaaacacaatctgaccatgatcatctggcatcttagggtgaaatatggttatactttggcccataccgaaagcaagattaaaaaggggcaggagagatagactgctgaactgattttcaaggttccaagaatattgtaggttaagagtaaaagtaaacttttggtagaaagcagtgggttgtctaggattgaagtatctgaagtttttaaacgaaaatttaaaaagaaaaatgagaattgccttacaagtacaatctcttcttttttaaaaaataaactttattttgaaatagttttagatttatagaaaaaaattagatagggtaggaagttttcatataccctacatccagttaccccagttattatcatcctaatttagtgtgagacattttcatgtttaatgaatcaatattgatatgctattaacttaagtccagactttattcagattttcttaatttctatgtaatgtcctttttctgttccagaattccatgcaggacaccggatacctcattacatttcattgtcatgtcaccttaggctcctcttgacagtttctcttctttttttgcttagaaattctccagaatttcagaaacttctgggcatcgctatggaactttttctgctgtgcagtgatgacgcagagtcagatgtcaggatggtggctgacgaatgcctcaacaaagttatcaaagtaagaaccgtgtggatgatgttctcctcagagctatcattgttgtaggctgagagaagaagcgatcattgagtgttcttctgttttgagtccctgaggatgtctgcacttttttcctttctgatgtatggtttggaggtgctctgttgtatggtttggaggtgctctgttgtatggtttggaggtgctctattgtatggtttggaggtgctctgttgtatggtttggaggtgctcttgtatggtttggaggtgctcttgtatggtttggaggtgctctgttgtatggtttggaggtggtcttgtatggtttgcaggtgctctattgcatggtttgcaggtgctctattgtatggtttggaagtgctcttgtatggtttggaggtgctcttgtatggtttggagatgctctattgtatggtttgcaggtgctctattgtatggtttggaagtgctcttgtatggtttggaggtgctcttgtatggtttggaggtgctctgttgtatggtttggaggtgctctgttgtatggtttggaggtgctcttgtatggtttggaggtgctctattgtatggtttggagatgctctggtatctgcctgcattgcttgccacacctgcccggtcagaaggcgctatgttgacaattgtgcctgcacggtgcctaggtcaatgaagggaaccgatggtagccactggatgctcctgggaaaatgtcactacaggcaccagagaagccagagctatgcccaaatttctatgagtctcagttttcttaaccataaaatgggatcaatgtttttgtggcatgtgtatgagtgtgtgtctgtgtatgtgtgaggattaaattgtgtatgtgtgaggactaattgccactactggatcctcaaagtggtaagaagtgttcttattaataatgacatccttacactcttacccagcaagattgatgggtgtggcactgcttctctttttccatcacatggtttccatggtatccttttgcccagggaatctttgctttgtggctagcactttgttgtttggctaatcacgctttctgtggtcaggacgctggcttctctggagccatgggattctagctccctgtcttgtccctagagtggtcactgtcttctctctccgcttgcaattcctgctttgctcgcatctcacttatgcagtgacgtatatcagtttcaccttgttctccgtgcctgctgatcattggcaccacttgcatggtgccatttagggcctgcttccagttaagcttgcttctccacaggcctaaatatccttgcttgcttcttttattctcactggcaggaccagggcggtctgtctttgcatgagacagggtctcgctcagtcacccaggctggagtgcagtggctgatcacggctcattgcagccttgagctaccgggctcaagctatcctcctggcttggccccttgagtagctgggactacaggcgtgcaccaccatgcccagctaatttttaaaattatttgtagagatgggatctcgccaggttgcccaggctggtcttgaacgcctgggctcaagtgatcctccctccttggtttcccaaagtgctgggatcacaggtgtgagccactgtgcctggcccttgatgtttcagttcttgatatttgatcctcagagtcagaaaatctaaaaagagggctatcccaggttgccttggttcatggcaaatgggacgttaagagggcagagagaatatgaacagaaactgttctaatattggtcatttaatgtgtaagtattgttcttttttaaacctccttcattttttttccaggaattgctggacacagtggcttggtgtgtgtctgaggactgtaggccatggccctaggttgtggttttaggtctcaggtgctcttcctggctgtctccttgcttctttcccatgtcctcttctttgtttccagccatttctcccttatgcttaagtttggtgcagcagggtttggctgctctcagattcctgcttcctcagatgctgtagttgtcaggcccagcgggctggcagcgggatcaggatctggctaggtttgctctcactgtggcagagtagggggaggcgtgggagagcacgtgtgaccccaggccagctgtagggagcataggcatggtcacgtagccttcaggtcctagactttgtcttctcatgagtatggctgtgtgtgtatggtgaaaactaggttctacttagcccaagaaaatgggcacattttgcatgtggtttctgtagagaaatgcactgggtatctgacatagcctggcagcatgcctccctcaggtaggttagtctcaggcggtgaagcacgtgtgtccagcaagaacttcatatgtggcataaagtctccgttctgtgaggtgctggcaaatcaccaccaccgtcaagaggctgaagtgatttttgtctagggaggcaggaaaggcttcctggagtcagcagccagtaggtgaaagagtagattggagaccttcttaatcatcaccgcctcttgtctcaaggggtgccaggaagctgtggaggctgaacccatcttatgctgccagagagtgggacaccatgagggtcaggtcaaggggttgtaccttgtttggtagagaattaggggctcttgaagactttggatgtggtcaggggagtgtatcatttaggaagagtgacccggtgaggacgtggggtagaggaggacaggtgggagggagtccaggtgggagtgagtagacccagcaggagtgcagggcctcgagccaggatggtggcagggctgtgaggagaggcagccacctgtgtgtctgcggaagcaggggcaagagggaagaggccagcagcgtgctgccatcacccagcgactggcgtagattgtgagagaccattccctgctcttaggaggggctgagttttagttttctcttgttatacaataagcttggtatttgtttacaaaacatttgtaaagctaaatcaaggtttgataaggcttctagttttatttaagaagtaatgttgaaataaatgtttgtccaattcgctttgctcatttaaggactttcagtacaaactgcaacaacaggattaggatttaaacgtttctgagatgtttttactcctcagaatttcccagaatgtgatctggttttgattttcaagcttgctgacccaataggttaacccacaagttttacgaagaccatctcagtccacttacatcaactgcccatgccacggttaaagagatcatcgactgatgtttggcacagcttcctccctcttgggtgggcaagcatttggaagagaaggctcctatgggtgagagtggggcaccaaagtcttccctgtcccatcccctagcttgagaagcccttctctaatgtggactttgtgccgttagcatcgttactagcttgaagttgaccatctggacgtactttctggtttagcctcacaagtgagcaaggagggttgagagatgtgctgtgaggaatgtggggccccagctggcagcaggctctgggtcaggggggcagggaccacgggcatacctgacagtgaggaggggccacacctgcagaaaaggatgcaggactccgccttgggaagtgttctaggccagagcgagggtctgtggtttataagtacacccacagtgctcgggaccctgcagatgtccagggtgccgtctgagcccgtatcatccaacagaatgttctgctagtgaagattaaagatttactccaggggctttaggatttattatatatatataaatcctatatatataattttttttttttttttttttgagatggagtttcgctcttgttgcccaggctggagtgcaatggcgtgatcttggctcactgcaacctccgcctcccgggttcaaactattctcctgcctcagcctctcgagtagctgggattacaggcgcccaccaccacacccggctaatttttgtattttttagtagagacggagtttctccatgttggtcaggctggtcttgaactcctgacctcaggtgatctgcccgccttggcctcccaaagtgctgggattacaggcatgagccaccccacctggccaggatttattgtatttgaaccatctaccattttaattttgatgttatgtagtatttgatgataatgaaagttaaattgtttttctttccatttttctgtttaagtgaatgacctgtatctagtttattcagtaacttcctgcatatatttgtttctttcattcttaatgaatatattcttaatttagttgctattatgttttgctttgccccaaaattgaaatcttagtttccttttagctcgttttagaactagtgatgggatgtgtcttccataaatctcttgtgatttgttgtaggctttgatggattctaatcttccaaggttacagctcgagctctataaggaaattaaaaaggtgggccttgcttttcttttttaaaaatgttttaaattttaaatttttataggtacacgtattttgtaggtacatgtaaatgtatatatttatggggtacatgagatattttgatacaggtatacaatacataataatcacaccatggaaagttggatatccatgccctcaagcatttatcctttgtgttacaaacaatccagttacatgctttacttattttattttatttttgagacagagtcttgctttcacccatgctagagtacagtggcatgaccttggctcactgcaacctccgcctcccgggttcaaccgaactttgggctggtctcaaactcctgacctcaggtgatccgcccgcctcggcctcccaaagtgttgggattacaggcgtgagccactgtgccgggcctgattgtacattttaaaataactaaaacagtcagggcacagtggctcatgcctgtaatcccagcattttgggaggctgaggcaggtgatcacctgagatcaggagttcgagaccagcctggccaacatggagaaaccctgtctctactaaaaatacaaaaattagccaagtgtggtggcgggcgcctgtaatcctggctactcgggaggctgaggtaggggaatcgcttgaacctgggggtggaggttgcagtgagccgagatcacgccactgcattccagcctgagcgacagagtgagactttgtctcaaaaaataaaaatgaaataaaattgggccgggtgtggtggctcacaccttagtcccagcactttgggaacctgaggcaggtggatgcttgagaccaggagtttgagaccagcatgggcaacatggcaaaacgctgtctgtacagaaattagctgggtgtggtggtgcacaactatagtctcagctacttgggagattgaggtgggaggattaattgagcctggaaggttgaatctataggtagctgagattgtgccactgcccttcagcctgggcgaccaagtgagaccctgtctcaaaagaaaaacaaaaaaacaaaaaacaaaccactattatcgactatatattattgtctatgatccctctgctgtgctgtcgaataccaggtcttgggcccttatttccatcactgagcaaacttcactctgttaagcagcaggtgtgggatttcatcgttattcagtaattcacaatgttagaaggaaatgctgtttggtagacgattgctttacttttcttcaaaaggttactctttattagatgagatgagaattaaaaatggtaacttactttatatctttataattgaagcccactagaccttaaagtagttaccagatgttttatgcatttaaatggccttttctctaaaattagaaagtaacaaggaaagaaaatgcttcgtttctatgcaaccctcttggtgactagtatgtgactcttaatgcaaccctcattgcaccccctcagaatggtgcccctcggagtttgcgtgctgccctgtggaggtttgctgagctggctcacctggttcggcctcagaaatgcaggtaagttgtacactctggatgttggtttttgtcgggggccagctgctactgatcctttatgtctcagctcagatgtcatttcaaaagtctgctctgccctctccaaattgcagtcgaccttgccctgtttatgtttccctcatagcactaatccatgtcagaaattgtcacgtacagtctatctgtgtgcttgtttattttctatcccacccttccgcaagagacttatgggatgtgtgccccaggacagcaggggtcttactgtcttatgctctgttgcagcccagcagcgataacagtgtctgcacatagtacttgcttaaaagatacttgccaaattgttgaaggttgaggtaccaatttcattattgctgactataggagttatagcaaaatatccatttgtctgttacatgagttaaaaatatggttgttgcactgtgaatagtttggtttagtcaaaacagttgtatcttaacggattgagaaacaaaagcaggaccacttttcatcagctccctccttctccttaaccagcaatacatgctgatgctgatatcccatagaccctcagctccatcctgagtcactgggaatgtggtctaaaccctcactattaatatgaactgagtttcaataagaatcttatatgggtcgggcatagtggctcatacctttgatcccagcacttcaggaggccaaggcaggtggattgcttgacccagactaggcaacatggtgaaacgccgcctctacaaaaaatacaaaacttagccaggcatggtggtgcgtgcctgtggtcacagccactcgagaggctgaggtgggaggatcacttgagcctgggaggtggaggtcgtgttgagccaagatcgcaccactgcactccagcctgggcaacagagtgagacctgtctcaaaaaaaccaaaatccagaaaagaacttatatggctgcagaggtataatcactaaggaaatttccttttgtataatcttttttcttttactatcatttaaaaaaatgtgttatatttctgaagcaacacatccaggttctgcacatagcagccaaagtgaccttaaagaatataactgggtcttgtcattcccttatttaaactcttgtacccatttcccagtgccgtttagatagagattccagactcgtcaatggctctgtcacctcagacaccctgcattgactcattagtctgattagagtcaggtttttcttcctcctgatggtttttttttcccccttagttctcagcggaacagtcacttccttagggaggtttccccagccaccctctgaggccgtgcttgttgccagactctgccactagagggcagggctgcaccactcctggcacctcgcacccggcctgccctgtcactctgtgtgttgggtgaattcctgtgatctgtgactcactgctctgtgtcctacacattcggcttttcttctctccccacaaccccattttataattctcctttttcaggaaagctttattcccatttaaaaatttttgtttttaaaatggtattttcttacacttattttctaattaaaaatgagtgttttaagaagtattatgatttactgcaaataatttttaaacccagccttttagatcctctgtgatcataagagaaatgaaggatgtctcccaacacttgagcttcatccacatttcatcctcctgttctttcagctgagttttccccatcccattagggactgttggaatataaaactggcttttccctaacagggaatgaattgcttctgtttctcctgaaggagagctggaagaatgacttgcgttcttttgcatacacaggccttacctggtgaaccttctgccgtgcctgactcgaacaagcaagagacccgaagaatcagtccaggagaccttggctgcagctgttcccaaaattatggcttcttttggcaattttgcaaatgacaatgaaattaaggtatgattgttgcctcaggtcacaaacatgcgagtgatgctgtgagtgagtctgtggagggtgagggcttctgaacagggagtcctgtgggagtgcttcttggggtatgttgtatgtcgtaatttagactaccatcatttgtgttatttttgaggcacctaaggacttctttccacttctcatttcttactgtggggtgaagagttgaattgggagatggtttctagatgcaaattgaaaaggcatttttccagagcagatttgttttcggcgtactagagtgactctttaacctagctgcgggaagatgactgtgccaagactgcaggtaggagaaagctcactgacgaggccttgtgggtctgaacgtcctgcagctatcagagcctgttggcttcctgttgtgcattccaacaaatcatcttcaaacccactttagtgttttgtttataatgtccagaaatagtgaccctgtcacatgctctacagattacaggattcttagcctcttcctttttggtaggtcagtcctgggtttgagcccaagtgaccctcctgggaggtgatgatacacactgggtagagtggaatcagatggacttggattagaattctgtcctctttactagttattttcctctaggcaaactgcccaacagctctaagctatttccttcgtattctgaaaaataagccttaatgggacccatatagggcaactctgagagtaaaataaaggaatatgtgttagagtgtagcatagtcacccacgggaagggcttagatgttagctgctactgctcttattagctgaatgatttggaataaactgttagcctctctcatgttttttctcttgagcttcgaagttttcttgttaatactaaggagatattcaaactagtcatggggttttggaatgacgaagggagatgatgaatctaaagaatttagtgtaatatttcttcatgctcagtaaatggtagtttctgctgctgttatttttattaccatctctttggaatgggagtaggtgctcctttgtggtcagaggctgtgagagctccacagcgccagtttgcccatctgtacactggggtctgttgaaggcagtcccctctgtgatatctctggctgtcagagctcagatgatagatggtatttttgtactcttagttctcatcattttcatgatttcgatcaccatttgagtatgatgatgctaacactttgttgaacgtagaatccgttaattacttccttcctgaacctttggcattaaaaaaaatctattctgctacctctctgctcatttatggttattcaaatttattatcaagagcctggtacagtggcttgtgcctataattgtagctacttgggaggctgaggtaggaggattgcttgaggccaggagtttgagaccagcctgggcaagatagtgagaccctatctctaaaaaaactgaaaaaaaattagctggacatgatggcatgtgcctgtggtcctagctactcaggaggctgagacaggaggctcggttgagcccaggagttggagttcgaggctacactgagctgtgattgtgccaccacactccagcatgggtggtaaaacaagatgccatttcttaaaaaaaaaaaatatatatatatatattatcaatgaaattcagtagtaccaacaggattataaacaaagatagtagttcccttcctactttttctcttaatccttgtgtctcacaggcaaacataactcttagtatttcttccaatatttactttcatgtttctttctttctttctttttttttctttgagatggagttttgctcttgttgccaaggctggagtgcaatgacgcaatcttggctcaccacaacctctgtctcccgggttcaagcgattctcctgcctcagcctcctagtagctgggattacaggcatgcatcaccacgctcggctaattttgtacttttagtagagatggggtttctccgggttggtcaggctggtctcgaactcctgacctcaggtgatcctcccacctcagcctcccaaagtgctgggattacaggcgtgagccactgcgcccagcaacttccacatttctaaataacatgcttctactgctattttttttttcaattttagacatttttttactttcactatagttctatcagaattcagtgtgtacgttattatgcctaagtaaatagtcatggttgcttacgtattatatttctttgattgtgtttcttatttgatgagaaagctgtgttttttgctctgggttgaaactggagagaggacctggggaggaggaggaggacagatgaagttggtgactgtaccttcatggccatagctgggttctcagcacccggggatctgctgatcacctactcataggccaggcccctatcgaagttctaggtgacccagtgctggggacgggggggccacctgcaaggtctaatcatggaggtgggggctacagtgttggcttgtgctggggccagcatccttaggaaggcatcttggaggtggaggagacagccgcccacttcttgattggggccttcagcagcaccagcttcttgggcaggctggtgctggctttcatcaccatgtcgtgttcaatcttcttccagatcctgacttctaggttcagctttcctcagaccctggttcctttcagaggccattgctgctgccttgctctttgctggcttgtgccttgattatatgtctttgtacaactttttgttttcctggagttaatcttcacatctgttttcttggagttaatcgttacctctatatcgcttgcttattattctttggcctttttgtcttctcacaccttccaacttctttgtaatatgtgtttagtacaatttttcatgacaggtagtttactgaatcagtttttccccagtgtggtcatccaacttgagttatccagctctctgccccagtctgggcaggttgatcttcaggtctgtagtacacttgtatcctaggacttctctttgccattagcctggaatttcctttgcagttctcccgttggatgcccagttcctagatgccatatgtttttctatcgtctagtagcttcctgagagaagatgaatgggagggaaattgtatgaggttttgcattcataaaaatgccattttttttcctgtacacttggctgggtatggtgttctggggtagaaatcattttccctcagaaatgcaaagtctttgccctgttgtcttaaaatctccaacgtgacccgattccttaacctatgaatgtacttttctttggaagctttccatttttggggaggtgaagtgctaggtacttagtaggccttttaatttggaaacttacatcccttcagttctgggaaaattttcttaacatttctctgagaagttcttgccttttattttctgtgttctctcctgaaattggttagttggatgttggtcctcctagattgactcacatcttacctttttcttttctttttctggtactttttagatatccatctcaaactcttctattcattgttatgtttttaacttctttcttttctttgtctcttgatggggtcttgccctgttgcccaggttgtggtgcagtggtgcgatcatagctcactgcagcctcaaattcctgggctcaagcagctgttctgcctcaccctcccaagtagttgggactacaggtatgcaccaccacgtccagctattttctttacttttttttttttttttttgagatggagtcctactctgtcgcccaggctagagtgcggtggtgggattttggctcacttaagcctctgcctcccaggttcaagcagttctcctgcctcagcctctcaagtagctgggattacaggtgtgcaccaccatgcccggctaatttttgtatttttagtagagccagagtttcaccatgttggccaggctggtctcgaacgcctgacctcaggtgatccgcctgccttggcctccgaaagtgccgggattacaggcgtgagcccatcattagatctttaaataccagtatctataagtcttttcctcttgagtcagctagtatccctggaaggaaattactcattttcctgcttggaggctataagcttggctatgtttatcctgcaaccggggactggaagggaggggactgacagtgttgctggtcagggtgccctcttactttttgttttctgtgtgcatctcacgtctgtcctcagcctatgtaaacacctcttgagattatccctctcaatctttgccggaggtgggggaggggctgcttcctgggctgccttggattggagggaagacctcaggtgagtgggtgggaatttgcccaaggagccatgagaccagccactatttcaccctctccatccctccactttcagatgtatgtggcgcctccaaagcccgagctcttcttggcgtctgtggcttcaataagcttgctttttgctggtatccctcctaccctcccctgtccccagcaaagcttgcatttgaacttcttcctacgggctaacaaatcagtcagttatgtagctcttgttactttttagcttccgaagttttgttgacacccgtagtctgctaatgtccctgttctgttctttctgttcgtgtaaatatatgctttatacaacttctttacatgatttttgtggggtttctgggtagcagagcttcacaagttcaatccagcgtgttggattagaaatctcccaccctctggtttattcttattctcaaaattacctgccaaacactgatactcccttgtttttccttttcctgacaggaaatgtacataccatacaggacagaaatcattagtgtatcccttggtgaataaccacaaagtgaacttaacccttgtaaccgccacccaggtcaagacagaatattaccaagcactcagaagcctctcccctattcccccgtcactgctcctgccttcctccccaaggtcatgactgctggcttctaattccagagtctgtttttaaattctgtgtacatagaccatggattaagtgttctttttgtctggtttattttggtcgacattaagttcatgagagtcttctatattatcgtgtgtattagtattcctgtagttttaggagcttcatagcattccattgtagggatataccacagtttattcattgtattatcactgggttgtttctagttcttggctattgcgagcagtgctactgtgaccactcttaggtgtgtcttttggagtacatgtgcaggtttccatcttgcacagctagaggtggagttgttgggtgatagggtgtgtgcatctcagctgcagtagaaactgccaaatagctttccttgagtgcttgtaccagctcacccttttgccactgtgtatggggattccaggagctctggtcctcgctagcacttggaattgctgatgcttttactcttagccttcctgatgggtgttttctggaatcacattatgattttaatttccattccttaaagtacccttggctctgaagtttaatgattcatgcatctcttcccttttgaagtactcttacaggtatgttgtgcatgtgttgaaaagtggcactatctattctaaaatacagtatgcctcctctgtgtttgaacagttgtagcgtggccttggggcctcctgttagctggcttggagaagggattcttgggattgtagagattagacctgaggaggccccttggagctctctgactaaattttattctttattattccaaactatttaagctcaccgtgtgctgactcatcataataatgagtagctctcattgtgcttgtctatttggactcatacaatgattttttttttttctttgagacagagtcttgctctgttgcctaggctggagtgcagtggcacaatctcggctcactgcagcctccacctcccaggttcaagtgattcttgtgcctcagcttctcaagtagctgagactgcaggtgcgtaccaccatgcctggctaatgtttgtatttttagtagagacggggtttcaccatgttggccaggttggtctcaaactcctgacctcaagtgatctgccttcttcagcctcccaaagtgctgggattacaggtgtgagccactgagcttggccaaagtagttttttaagatgttagtatcttttcttgcagctaaaaaagtttgtcagagatgattctactttgttctccaggtgttttctcagggagaaattggaggcagtaagccactgggggagtcctgtggctggggggtggggtagtcctgtggctccttgtcagggagtcctgtggctggcaaggagagaagtcctgtggctgggttgggagggagtcctgtggctggggtctcatcctgtgcctaacagtgtccagaggtgccgagaccagctcagtcggggagaccctaacccagcagcgctagaggaattaaagacacacacacagaaatatagaggtgtgaagtgggaaatcaggggtctcacagcctttagagctgagagccctgaacagagatttacccacatatttattaatagcaaaccagtcattagcattgtttctatagatgttaaattaactaaaagtatcccttatgggaaacgaggggatgggccgaattaaaagaagaggttgggctagttaaccgcagcaggagcatgtccttaaggcacagatcgctcatgctattgtttgtggcttaagaatgcctttaagcggttttccaccctgggtgggccaggtgttccttgccctcattcctgtcaacccacaaccttccagtgtgggcattagggccattatgaacatgttacagtgcttcagagattttgtttatggccagttttggggccagtttatggccagattttggggggcctgctcccaatacagaggtctcgtgtaaattccctgggaggcgataagcctctgagaaacagactatgctaaccacgccatgaaagagaaacttatttataaatcagatgccagttactagtttactgcttatttgcccaggcgtagctctgacagagtccccgactcatagtgcttgctcagtgcatgctgaacaatgattggaatcaagtcatggctcagagcatagttttgaataatgggaaatggatgttcttaagtaacatagtcaccaagataatgcgactagctgggtcaccccttttcaattttaggatatttttatcaagatttaaatggccatcattagagttatagcactttctcctttggattgtcctagaggcccatgagaaagtattccctaatttcttaggagaacagtttgtgggtagtatgcggtcatgtccagttaaattgcagatatttccgatcgaagatgttccagtcctgagaacttcgtgacattagcaggacttctacaagccatctcttagggtggggcatttactgcagttggctagtactcttttctccttaactttgtcatttgttgatttttttttaactgtccccaaatactgtgggcagagtgtatctagaattgaggcctccaccattgcggagaggacatggatgctgagcagtcccctgagtgaaggttataaagaagcaaatagactacacatgtctgtaaactgctcttgagtgtcccaaatttggggtacttcagttcagctgtaggaaaagcctcaaactgtttatactttgcaagaattggaaacttctaattcacgttaagttttatgtaatacatgataagcttcataggagcttcatcttttatctacttggacttttgcttccgtaggttttgttaaaggccttcatagcgaacctgaagtcaagctcccccaccattcggcggacagcggctggatcagcagtgagcatctgccagcactcaagaaggacacaatatttctatagttggctactaaatgtgctcttaggtaaggtggaggcatatgagtggaagagtctccagcatgtactcaagatagacctttgaaataaataaaaccagatgatccctcagcttctagaccaggctatttggcactggttgattgaatgtgaactgcactggggctgctgtgagcccgcatgggtctctgtgaccctgcagatgcagccgtgcccagggactgggcagtgggtgtgggctggtgtgagccctgtctgccacccagggcctggccctctgtctgtgtcggccatgactatggtgagtcttgtaggcttgagactgtgcctcgggttcctgcgggttctctgtaggtcagttgacagtttctcctgttgtttgggtaactgtggaaacgaacactggcaagtgctgaagcgagcatgtggacgtgcgatatgaaataacgacctggctttcaaaggcagtgaggctctctggaaaggaccttgctgagctagggatgtgggtgtgtagccattcccagtgggcctcatggcgtactcgttcatgatcatgtttgtgccatcttgatctctcaggatctcttcttttttaacagattaagccgggaatctccaaacagtgagtcagatgttaagatgtcttgcttccacccccacaggcttactcgttcctgtcgaggatgaacactccactctgctgattcttggcgtgctgctcaccctgaggtatttggtgcccttgctgcagcagcaggtcaaggacacaagcctgaaaggcagcttcggagtgacaaggaaagaaatggaagtctctccttctgcagagcagcttgtccaggtaggagcacagggtttactctaggccctgcatgtgaatgactgacattcaaagaaccgattaatttggaagagaagcggcagaaccgagagttagaggtgtggactctggagctgcgctgctcgtttccaaccctaggtgctgacctctagctgtcttccctctgtatgtccctgtcaccgtgagtcaaatgcgggtgatgcctcctcaggtgccgtgttacctaagcctctcagagaccactgctaccctgtttctaaaaccagaggtcacgatatgtgttcatccacccagtaaatactgattgagcacccactgtgtgctaggctctgggataggggctgggtatacaatggtgagtatttcagctgcagcttctgccccgtggaggctgtggcctagcacactggtctaggcacggtggtatatgctcactcaaggagatagggacgtggtcgtttggggtgtcggaacaaaatgtcggaacttctctttccaatgcagagaaaccttgcagtaattctaatgtactgtgattggcagttgacttcagttctttgtagcacgcttactcaggttatttcactaactatgtaaccatgcagcctcattttaagcaattggattttttgaactttacttaaaatgttatgtcagggtttttattgtgcttaatgtgtgccatttagctaagttttgtaggatacgaaattgtaagtggcttaaaatgattcttaatagaatcatgaattgaagataatgctaataatttaagcactgagttaggtagtgtttgtaaaatgcttagaatgcttcctggcacatgttaaggccatgtaagtgctgcgtgttgataaacagctgagcaaaagtggactcttaagaaagtattggggctgagagttctgttccaaccagctgccctttggttatttttcagaataaaagcagagtctcatgggatatgacatttatatttccttcacaaaaaacactgctgagtgttttgttgagtaaaaagggtgtagccatggtaataatacatttaaaatatagtttatttcatctttaccttgccttgttttttttttaagctagctttttattgagaattccacacatacaaaagtatcaactcatgaccagttatatttcatttataatcctacttctccctttttttattatttgaaagcaaaccccaattatcctcttatttcatctataagtatttcagtatctctatagatgaggactcttctttatttttaaaactttatttttaaaatgatggtcagatgcagtgttcatgcctgtaatcccagaactttgggaggccaagctgggcggatcacttgaacctgggagtttgagaccagcccgggaaacatggcgaaaccccatgtcttaaagaaaaaaatcagccaagtgtggtgatgcatgcctgtagtcccagctacttgggaggctgagatgggagggtcacatgagcctggaagatcaaggctgcagtgatccatgattgtaccactgcactccatcctgggtgatggagcaagattctgtctcaaaaaaacaaaactgcaaaacaacgtcacaaaacagtgccattgttagacctgaaaatattaaacatttcctacatcaaatacccaccaactcattatcaatttttctctctactcttttggaatcagcatctaaataaaattggtcgataaggattgtaaatctctttgatgaactggttcccctccatcccagtttttttcccttagagttcatttattgagaaaccagattgtttgtcttctaagttttcctgtggtctgatatactgcttccatctccactgtgtaaattaacacctttttctcttctctgtatttcctgtaaatcaataattggaggaaaagccttgtcagatttagtgtatattttatatctgagtccagtatttcttatataatattttaagataagtgtactcttttaaaaagtattgaaactatatgctcaattttttttaactgatgcttttaagaaggctgcttgatcataaaagtttagagatcattggtctgatgggaaaagcaaataattactaaaccgtttagcaaggttgaggtgcacatggtggggcctggagaagttcagtcatgagccgtcacttatgggcacgtggaatctgacccggcacagagttgggagaagacaggagctttatagacagaaaatgtggtctttgctaagtcccaggagtgaaagggtgagacagtgctcacagcacacgagtgtgggtgcgtagacagagcaagggtgggtcctgaaaaggcctgcaggctttctcatagattagcaagagtgctggttacggaggtttctaacatttgtgaacagatcgaaactgtgttaaattgggattgcagtaatcctggaaggacagggatagagggtgaaggggaaaaaagggtatggatgtgagacttaattgctgattttcttaagacctttctccaaagtaaataaatgatgtggcacatttttgaactggcaaattctaaactctagatatgattatctctataacatatcttactccatcttcttttgactaaaaactgttcttaattaaattaccatgagacgttcaattcagcaaatgtagtttggctaaccatatttaattagaatttaatataatcctaggcctggccaaactattaagcaagtgtgggcaaaatattgataattttagatatgcaggaacttagtttgctttccatgtgtgcttttcgaaaaaggaataaattgaaaaatagaggaagccctgaaatccaagaagcaaactctctcacctaggcatgcagtaaaagcaattctaggatgattgctgtttggcgcgtagttcgtattagaaaccattcttcttgaataaatagtatgtttaagaagctgggcagagggaaggcatatgcatatattatcaacaaggagggagaaaaaggcaattagtaaccatccataggagggtcagcaagatttataaaggaaatttgtgatccaagtatgaagcaaaataaggtgcagaataaattttaagcaagtaatagattagagtaagagaacccatttgaccattaaccttgggacattctctttcaaatgacatggagtagtactgaaatctttctttctttctgagtctaggttattgtgactggactcagaaagaaatatttcattattgcagtgaataacatttgtgaacattattgttcataaattatgcagtgaataacatttatgaacacgtgatgtgtaagatacatactgtttatttttagttaagttttttggctcaacttctaggcagagaacattaaatgtaaatagtgttacctaggagcatgtaaatggaaatctccatagtatgaaagcagtgctgttgctaacagaatttaggagggggcagatgaggtgaaggaaatgtgggtgctgatttccttattacattgagaggagccaggagattctttgttcaaaatggatggcttaagaagtcaaagtataagctgattacgtagagcaggtacccaaaaatgttttgtgtaaggggccagatagtaaatattttcagtcttgcaggccatcccaagtctgtggcagctactcaacactacctttgtagcatgaaagcagccacaggcagcccataaatgtggctctgttccggtgaaactttaggtacaaaagcaggtgcaggccagacctgacctgtgcactgtggtttgctgacctgggattcaggggtatagaagttaccatcagaagagctaaaagtgagactttttactttatactcttctacactgtctgattttgaaaaaaagaaacatgtattttataatattaaagatagggttggcaaatagcaaataaaaatacagaataccagtgaaatttgaacttcagatacattatgagtaattttatggtgtaagtatattccaaatcatgtgggacatacttacactacaaaattatttgttgtttgtttacagtttaaatttgagtgccttgtattttatctggcaactgtaattaaagggaaaaagaataaattcattatgttcatataatgtgatatagcaggggtccccaacccccaggctgcagagtggtactggtccatgggtccccaacccccaggctgcagagcggtattggtccatggcctgttaggaaccaggctgcccagcaggaagtgagcagcaggtgagctggcattcccacctgagcaccgcctcctgtcagatcagtggcagcattagattcccataggagtgcaaaccctattgtgaactgcacatgtgaggggtctaggttgtgcgctccttatgagaatctaatgcctgatgatctgaggtggaacagtctcgtcttgaaaccatcccctggccctgtggaaaaattgtctcccatgaaaccagtctctggtgccagaaaggttgggtagcactgtgatatagtattaaaagtgctaataaatatggcatactgcctttaaaatgtctggtagctctttctcagtggcactcataatagtgttttttgatttttaaatgtgtgtcaagctgactctcccctccgtgtatgctgggctttattttccctttcctagtcaccagttttgggaaatagagatcttcattctcatgctgctcctctagtgcaagtgctccatttatttttaaggaattaatataacaaaaaatcatgggaatttagaaaacaacatggaagctaatgatcacattggtggaagtgatagggaaatatttagggggagaagttaaggtataaactttgtcaatgaagtcctattaaaaacaacaaaaaagtgaagcttaggatgcattttataaactctgaccagaacacctgtgtttctctgtttctaggtttatgaactgacgttacatcatacacagcaccaagaccacaatgttgtgaccggagccctggagctgttgcagcagctcttcagaacgcctccacccgagcttctgcaaaccctgaccgcagtcgggggcattgggcagctcaccgctgctaaggaggagtctggtggccgaagccgtagtgggagtattgtggaacttataggcaagttattagcaaggtctactcttacaattaactttgcagtaatactagttacactctattgattatgggcctgccctgtgctaagcagtctgcattccatcttccttgccaaaacttataatacaaatttcatctttattttataaataggggagttgggctgggtgtggtggctcacgcctgtaatttcagcactttggaaggatcgcttcagcccaggagtttgagacaacctggccaagtgagaccctgtctctacaaaaaaaaaaaaaaaaaaaaaattagctgggcatggtggcacatgcctgtagtcccagctgctttggaggctgaggtggtaggattgcttaagcccaagaggttgaggctgcagtgaatcttgatggcagctgcactgagcctggtgacagagcaagatgctgtctcaaaataaatttaaaaataaaataagagaattaaagtttagcaggttgggtggcaaaatgaggccacacatttaaagcccctcctcctgattcttttctctgccttggctgcctcctgtggcattttaggtgctgagaaatgaaaacagtagggaaaatagttccaggatcctcatgttaatttgccagaaatggcatcttcaagtcgtcagagggatctgagagttccttcctggcctgacttgagaaaatccgtctgtccccagctctgcgtctgcctccactgcccagtcacctcctctccatgctcttggggctgggccctaccccaccatgcagtgctgccctggagcagtgagcttggtgggtcctgtctggcatgagagctgcctttgggagctggatcccagcctctaccactgggtctggtgcctagcaggctatggataaacttctgctgactccggcctctcctaagccactgcaacgtggtcggtgtagtgcacagtgtgtgtgcagcgtggccttactcacagcctccacattagagagaatctgactgaagtcttactgctgcctcgtgtgaacataaatgtttgccagaaccatgagcaggaaatgttaatctgccttgtttcctgtcctttacacggaagaatttttttctgtatggaatgcgtgccttacaaataatgagtggaaatacccatcgctaatgaaaagttatacttgactgttagtcagctaaataatctgagatttctaatacttttaatttggcttttacaatgcaatttatcttagcttttttgatttcttaggtcatatctttagaactatatatttgaatgttaatgtaattttcatattgaaattaaaatgttgaactgcgatgttaagtgtttcctgtggaaaaacgttcacattttctctagttttaaagttgaatcaagctgtttgaagattttcacatttcttctagattttatcagcttgttactttatctgtcactttctgtgatttgcagctggagggggttcctcatgcagccctgtcctttcaagaaaacaaaaaggtgattatttcagaaatcagagtcttgtgttgaatcttactgattttcttgtatttctgtaatgtaatgtatcttgtatttcttgtaatactgtattggactctgtgtatatctcttctcagatgagtgattatatgtgtgaatgttgctggaatctgataaccaggcctgaatagttttgtagggtggcttttaaaaattactttcatatcagaattgctttgtcataaattttgaacgcatcataaatttctaatgttcggggtcagcagactttttttgtaaagggacagagtgtaaacatcttagctttatgggccatatggtctcttttgcaacattcagctctgccctgtgacaggaatgcagttgtaaagacatgagctactggccagctatgttccagtagaactttacttacagaaacagacaggctgtagtttgccaatacctgccttagggaatgtgttgttatattttgtgagttaccttctcagtaaattttatttagtattagtcaggaatattattaagtagcttcttttccagcctggtcaacatagtgagacccggtctctaccaaaacaaaacaaaacaaaaaaacagccacgcatgtggcatgtgcctgtagcctcagctgctgctcagggggctgaggcaagaggattgtttgagcccaggagtttgaggtcacagtgagctgtagtcatgccactgcactccagcctaggcaacagaatgagaccttgtgtcttaaaaaaaaaaagtttcctttgttgggttattttaatttggacctggttatcatttttcagccatatttaactttgtacatatcagaatgttctgataaaacttaacttttattaaagtgtttgtgatataatctgctagttttggtacacattatcttttgcaatgccagttattttcttttccagtgtgggtttgcataggaaaagaattgctgtcactttctattttgaaatcttaaaagactgatccttttttgtgtcatgatttgagtatttaattgagagcctaatgcctaatattatttgcagtattaaatgggatcttaacaggaatagcattctagccttcattgaattaagtaaacatttcttaagagaacttggaatctataatatttgcgtcatcatagtatgagatacttaatcaagtttgagattttagtgaaacattgtttagaagccaaaaggattctaggaaaaattaatgtctatattcttgaattaggagagattttgggacgtgtgactaagttacgctgacacttgtttgtttcttagtcgctttttccagtggcggtgagaacgaagatgactgattcacattgctcagatgagtttatcctcttctggctgggacatgggatatatcctgtctcttttaagcctttttggtatttttcccccattgagagctgtgtcttcaaactcttctgttatagctggaaaatcctttttaagtgaaatctgcccaaattataagacagatgaaggtagagttgtgttggatataggattagggtgaaagtagtgggggtgtcctggagcctctcttctggtggcagcctagctcttgtgcctttgaggaaattaccctggggacggctctgtggaacatatttgcaaaccactgatttggaagatagagatggcttttgttaagatctgaattcacctttttggcattttatttgatttctcaaggtaaagaacttattttgtaataaagtttcctattatttagtagataggccaagttgctgtgttaattccatgtagattttgggtttcctttgctcattttttcactcttaatctcacatcattgtaagtttatggaagttatcatacttctgactttttctttgaagagcagaaattagaaattcccaataattattttgatagtgtcatttaatgacactcacatgtgatgtagccacaaagatttaatgagttcagttttaaatcatattaagactgttggtttcatttgttctcattaatgtaattctgaagatgaacaataaaatgtatttttagaactttcaaatgaaatattatttcatccttccagatcatataatgcttaagttctgattgttaatcataaagtctagaaaattaaaagataataaaatgaaagtgacttttaggtattagagttttattataaattctggtgtgtcattggagctatgacatgaatatttcaaaggccaatagcattggatctttacagttataacttaccatttttaagtttaagtagtaatatagattatttaataatcaaaatcaataaatattaattattaaaatgttttgtggtatagtttgagaatcattgcttttaactttttccatataggtttattgactttaatagcattctaaacataacatctctacattctttgtgtttaatactgtggaggtataaaaatacttatatatgatgataaactatattagagtaaattaaatattcttatgagtttcattttagagtgcatttacttaattttgaagtccttatttttagcaaactaaaaggaatgttggtacattatttactaggcaaagtgctcttaggagaagaagaagccttggaggatgactctgaatcgagatcggatgtcagcagctctgccttaacaggtagttctcactagttagccgctggtgtggaccttcactgtctgccttccaccccttgcccttcctgctcgtccccctgcacctggtggacagcacgactgggggcagcagtggagccaggttgcttaaatggggcatattcgggcttcttttataatacttactctgaagcttgtgtgtctgtggtgtttgcatcatatatttgttgttttccatggtttaggctgttttaaaattaggtttatggcttgagcatagggctttgtgagtaggggatggcaggtcgaaacatctcatgagttggatgggttatgctgggggttgggaaatgggatgaaaaattatgggatgaaaaattgcctatggatagtttaacttgaaagaatctgcctttgtttacagatagttatcttttttcttttttgagatagagtctcacactgtcacccagtgcagatacccagtgtcactggagtgcagtggtgtgctcttggtgcactgcagcctccgccttctgggttccagcgattctcctgcctcagcctcccaagtagctgggactacaggtgcccgccaccacgcttggctaatttttgtatttttttgtggagacgggtttttgccatgttggtcaggctggtcttgaactcctgacctcaagtgatctgcctgcctcagcctcccacagtgccgggattacaggagtgagccactgtgcccggccagttacagatacttatctaatgaaattctctgtgtactttataaaagatgaggattaactgaaggtactaataactggattatatgagggtggttttggttgtataatcctatctaaaagaatattttagctataactgaaagtaagacttaaatatttagagaggaaaatctgaataattctagtagtaattatttatttacaaaataaaaatagatttttttttgattacacaaattaaacaacaataaaacatcacagcaatccggatactataaagctcacatgcttaccgacccaactgccccaggagtgaccactgccaacagcttcatgtcgacctttttgccataatttttatatagccttttttgtttttaaatggtaatttagaaagtcaactaggaaaatgtgttacaggtttatcttccaggagaataggactggagtcgagatcttgaatgtggcttggaagaaggcaagcccaccccagagagatgagttgacagttgtttctgaccactgcttgcttagagggcctgcgtgtctgtgaccgcctagctttgcgcccctgactaggctgccccttaattacaaatgtctttatatattgctccagctaaggcttggagtagtcggttaagaacttgaacttcggtttttgcagtgaaacagcatttgagaatatcaccttctgataagccttattttataaggtgggtactgtagtgggaggcagtgtgagagatgcttgaaggatgcactgctgtcctgcatttcagcatcttcaggatgctgtgcagctgaaacatttgataacggtggaactgttcgttattttgcaagcctgtgattccctattgaatgttttctctcgccatttgacaaatgagtgtttctctgtcttcagcctcagtgaaggatgagatcagtggagagctggctgcttcttcaggggtttccactccagggtcagcaggtcatgacatcatcacagaacagccacggtcacagcacacactgcaggcggactcagtggatctggccagctgtgacttgacaagctctgccactgatggggatgaggaggatatcttgagccacagctccagccaggtcagcgccgtcccatctgaccctgccatggacctgaatgatgggacccaggcctcgtcgcccatcagcgacagctcccagaccaccaccgaagggcctgattcagctgttaccccttcagacagttctgaaattgtaagtgggcagaggggcctgacatctttttttttattttttatttgagacagagtctcactccatagtgcagtggaggccgggcacaggggctcatgcctgtaatcccagcactttgggagactgaggcaggcggatcacttgaggtcaggagttcgagaccagcctggccaacatggtgaaaccctgtctctactaaaaatacaaaaattagttgggcgtggtggcacatgtctgtagtcccagctgttagggaggctgaggcaggagaattgcttgagcctgggaggcagaggttgcaatgagccgagatcgtgacactgcactccagcccgggcaacagagcaagactccatttcaaaaaaaataaaaaaataaagtgcagtggctcgttctcagcccactgcaacttctgcctcccaggctcgagcgattctcccgcctcagcctcctgagtaggtgggattacaggtgggcaccaccacactcagctaatgtttgtattttcagtagagacagggtttcaccatgttggccaggctggtctcaaactcctgaccttagatgatccacccaccttggcctcctaaagtattgggattatagttgtgagccaccatgcccggccctgccacctgccatcttttgagttcttccctggagacctagacctgaaccctcctgcttgttctcttgttatctaatacccctattgacagcgcagcttagatcattaatggagagcttgacctcatctgataccttcactgaaggaaacaacttagtgtcttttgtgttgaacactgaggtaaaaaattggaatagttgattatatgaactctgctaaaattgagtgcattttacattttttaaggccttgttgggccctggttaaataattatttttaaaaatccttaaggagcctattataaacagatctgtggtcttaatgaaatgtgattaatactgtgcattattttaagaacttttgacttttcaaaaaacttttacaacatttcccatttgatagcggcataggtttaagcacttctcatctctaagttagtggacaaaaaaccctcatggatagtctaataatgtttgctacaagtccatgttgagttttatactccattttattttcagttttaaaaactgtggttaaatatgtgtaacataaaatttatgttcttaaccattttttgcgtatacagttcgctggtattaaatacatttaaataatgtcatggaatcattgctaccacccatctctgtaaccttttgatcatgtaacactgaagctctgttcccattgaactctattcctcctttcccgccaagtccctggcaaccacgattcttctttctgtcttctgaatttgactactttgggttctcatatactttaggagtcacacagtatttgttttacttagcataatgtccccaaagctcatgcatgttgtagcctatgttagaacttcctaatgtttcaggccaaatactattccattgtatggataggccacattttgcttttccattcctctgtccatggacacttgtattgcttcatgttttagccattgtgaatcatgctgttatgaacgtgggtgtacagatagctcctggagactctgctttccatttttttggctaaatacccagaaatggagttgcttttacattccaattttaatttaaaacattcatatcattgagtgttttacttaatagtatagtagttaacaaacttaataaaatagtattttggtaataatttgctggtagtccattgttcagtttttttaggtaaattacacaggacatttcaagtggacatgaaacatcttgtgatgtggaatcatgccccaagctgatggctaaacatatgaaataccataccctaaatttagtagatttagtctttgcaatttaggagataacctgttatattgttaggtttttgtcgaaaagctttgtcctcatatttccaacttgctgtaaaatttgtttgtgaagacaaatatttttgtatgggttttttctttttcatattaaaaagaaatgtccacattggaatttttttggagtttttagagctaatagagcttttcataatgtagtgggaatgagtgatcagtaagctcttagcagtttccatgcgtgcatttctgtgccttgaaataaatgacagatgagtacatttgtgttctgtgtgtaaaatgtgctctttcctcattgcacttccatgttggagggcttgtctcttggtgatcacacttcaaaattctcacagccccccttgaaccgtttaggtgttagacggtaccgacaaccagtatttgggcctgcagattggacagccccaggatgaagatgaggaagccacaggtattcttcctgatgaagcctcggaggccttcaggaactcttccatgggtatgtggactacaggtgatgcgctacaaagtggtttgtattcagacctggacatcttaattatatctttgcttccaagaagaagtcctttgatactgttttctgagttctgaatagctgatgaaaatgaccaattgaggaataatcatactttttcttgatctaaatcttatacttttgagttatcttagcataaatgtataattgtattttaagtggaaatttgtcacttaatcttgatttctctgtttttaaagcccttcaacaggcacatttattgaaaaacatgagtcactgcaggcagccttctgacagcagtgttgataaatttgtgttgagagatgaagctactgaaccgggtgatcaagaaaacaaggtgagggacataggcttgagacgacttggtgtttctgagcttgtgtgaggatttaaaatcgccctggctactgtctactttattgctttcccatccctgggcctttaaatttcccctttaaataccagctcttcccaggcctgttgttttctgcctttccaggtactacccacagccttgagaattgcctgagttctgcctcctttgagagtgtgccccagacaaatctattctgtactgaatgtttccttgtctgatttcttggatcattcatttgatggttgcgtatggcctgcaacgtttcttgttttggttctactgaactgttctaaaagtctctcttcatattatctttttacatgtaaatgtaactgtcttcacttttaattcctcaaggacaaggaatagcgtttcacagttcgtcccatcaatcagaattatagcctttggcatctccctatctaccaggcccacttcctcttagatttgggcttccccaggctgttgcctttccccaagtagcttctgcttgtcctgtagaagacctttcatgctttgcttctgcagcagccgttcctgaatgcctagtgtcaactgccttcttaccacgcccaccctccctgcatgctgcatttatcccctgccacagccctgtgaccctgtgtcctgctgcctctgacttgtctgtttctgcttggccatggtctctgtgaggtcaggtgtgcatatgggcacaaaccagggcatctctttatccccagcacctggcttaagtgctgctctggaactatctgttgaatgaactaatgcatgaatgtattgttgagtatgagacaaacaagtgtcattgtctcctttctagccttgccgcatcaaaggtgacattggacagtccactgatgatgactctgcacctcttgtccattgtgtccgccttttatctgcttcgtttttgctaacagggggaaaaaatggtgagtacaaaaggggatgtgcacagttgaaggaaataactaggtttcagaggtcagcttggtggcctgtttttgccttgcgtgcagcagaggaagtagaatctgaggatgagtttggttttcactagccgaggggagggaggaaatgatgggagcaggtaggttattgggtctggttttgttcatttgaaaacaatctgttgtttgaggctgaaggtggcttgggtgatttcttggcagtgctggttccggacagggatgtgagggtcagcgtgaaggccctggccctcagctgtgtgggagcagctgtggccctccacccggaatctttcttcagcaaactctataaagttcctcttgacaccacggaataccctggtatgttaaaagttcacatcttattttctcagatttaatcattattgtaaaaactatttcagtattgactattttagttttagagcagtaagtgttttgagttcatttgggatatttgacctgcgttgtagctcttcagaaaacacatgaatagtgaagttctttgtttcatgggttccctttagatgaaacccatagaggagaaaagtagaaacctcagcacgtaagagccaacatatatacacatcggatttaaacctaaagcacaaattgtgcctggtcgcagtggcgctgagtcgcactcagccaggccaggcattcacactcagggtgagtgggaaccaggactggctgaggcagcagtggacccaagtctccatcgcgcccatgcttactatggagccttctcgttctctctttttctttgggtgagagggtacacttgtgtttttgaatttatatgaggtaagtgtgtaatagggttttttctaatcttttttaagtggaatctggaattttaatcagatttattatctgacaacctagaattataatccagaaagtctgtggtattgaggacatattggcaatatgatgaatctctaattcttaaatcctgaaacttttttttttttaatcacttagggttattatagtgaagtcatttctgaatttggatcttctcttcacacctctttttctctttcctgagaattaagcttttgtttcgagttagaaagttgatagtagggaattgttccatggctgagcaatttatctccacagaggaacagtatgtctcagacatcttgaactacatcgatcatggagacccacaggttcgaggagccactgccattctctgtgggaccctcatctgctccatcctcagcaggtcccgcttccacgtgggagattggatgggcaccattagaaccctcacaggtaacggccagtttttcagctgtgttttttctagttatgcttactaaggtttaagtttagatgatgatgtttgttgcttgttcttctggttaggaaatacattttctttggcggattgcattcctttgctgcggaaaacactgaaggatgagtcttctgttacttgcaagttagcttgtacagctgtgagggtgagcataatcttctgtggaaccatttcttcacttagtggacattttatcattgctacaattaaaattggagcttaataggaaatatttccatgcactctaaagctgtaaccagtaatacccaccatgtatccatctctcagctttagaaagaaaacgttgccagtaaagttaatgcttcataaacttcagtttaagttctaattctcagaatatttgtttgaaatagacctcttcctaaaggatatatttagaaataacctatcattaagtgtaaagtctgttgaatatgctgggcacggtgactcacacctgtaatctgaccactttgggaggccaaggtggaaggattgcttgagcccaggagttcaagactatgggcaacatagttgaccctgtccctacagaaaattaaaaaaaaaaaaaaaaaaagtagctgggtatggtggtgcatacctgtagtctcagctactcgggaagctgaggtggaggggggattgcttgagccccagagatcaaggctgcagtaaggcgtggttacaccactgccctctagcctgggcaacagagtgagactgtctcaaaaataatagtaataataatcagttgaattaaaaaaaaaaaaaaaaaaaccactgtgctaggcccatagtatggtaagagttaaagtgagccttagggattatttactcaacctctgtttctgtataaagtggaataggctcaattctttaagtgatagcatgttgaacctttccataccaactggctcataagtcacaactggccagtcaacaagagtaaaaattaactggtaaaaatcaaagcaaaaaacctacaattgtcaaatttgtgggataactcccccttttaaaatgtcatgcctgacagtaatttctctctagtttccaggttttcagtcagttgtgtcttttttgagcagaaggaagcatgctaagagctcaatcttgtggctagctgggggtctttgtgtcagccatgcatgtgatggtgcccctgggtgcttggggctgcaggggaggggtacagcagtaggggcctgttctgttctctcgtgctgtggagtacatagtgacatagtggggtggtccttggtgtaggtcccttgttcctacccctgggtctgagatttatttagaagtggtgttggggctgtgcggcaggcccctctgtaactgatcaatgtttgtgaagttgctgtttgagagttgaaaccatgacataagcagaaatggaaggaagaaagaaccagttatgtgaaagggacacatttacttttaagcttgtatttactgagataaagtattcttaatcaatgttcttgagaggtgtgggaaaaatgcaacatcctggttgcagttaaacccagaacattgtgtgttgaagagtgacggttctcaaaccgtcaagacgcgggtactgagtgggactaacctgctgtcctcttgccttggaccttgtgttccagaactgtgtcatgagtctctgcagcagcagctacagtgagttaggactgcagctgatcatcgatgtgctgactctgaggaacagttcctattggctggtgaggacagagcttctggaaacccttgcagagattgacttcaggtaagtgagtcacatccattagatttcatgaactaagctcaattgaaagttctgggatcacttgatgcaaggaatgatgttatcaagtaccctgtccatcagaaatccgagtggtttaggtagatgacagtgattttctcctcccagtggctttttgctgaactttgccctatgcttggaattttattttattttattatttatttagagacaagatcttgctctgtcgcccaggcttgaatgcagtagcacaatcatagctcactgaagctttgaactctaggactcaagtggtcctcctgcctcagcctcccgattagctaggagaataggtgtgtgccgtcacactggctaatattttttgtagaaatggggtcttgctatgttgcccaggctggtctcaaactcctgggcttgattgatcctccatcttggcctcccaaagtgctgggattacaggcatgagccactgtgcctggcctagaattttaaaatataagtagaagagtagatttttttttttggtagtcctcgtcatttaagtattctggatagtgggaataaaagagcttagaatttttcatctttgtcttaaacttttaaaaaaatgtagcttatattaattctgcttgtttaaaaagaatatactcttcattatactgaacctaggtaagacagctggtttatattttgttgcaattaaaaaacgtgagctgtggttgcagtgagccaagattgtggccattgcacttcagcctggcaacagagtgagacttggcctcaaaaaaaaaaaaataacatgagctgtgttggcactttcattttctaagagtagttttggctggagaagttttctttcagtactttcttttagaagggaaattttcctttataatttagggtttgttttttttttttccaagccaccttttatagagcccttgtgggttatttcatttaatccttagaatgtttataaatctgggcttgttctcggctccacccacagatagggacgctgagcgtgcatgagtgggcagcaagatagcaggttatggagggcccagctcaccccttctgtggcttgagccaattttatagggcacttacagagtcttttgaaatagtatttattttgaagaaaaagaaaaacagtttactgagtactgtcttattgagtctggaattgtgagaggaatgccacctctatttatttaaagccattggccttttttgttgttttgagtaagtgctgcccaaggtccttccagggcacctggatgagcctgctctggagcaagctggcggtaagtgtttactgagtaactaaatgatttcattgttaaatgtgctcttttgttaggctggtgagctttttggaggcaaaagcagaaaacttacacagaggggctcatcattatacaggggtaagcggtttatttttgtgagatgctgttttaccttcaagaaggtgaaagtgaggctttccttgtggaatttctctaaatgcattcgtcatgttttagatgtttatttcacagtttatatcatgaaagttataatcttgtcatatggatttaagtctagtaatgttgagttctttctcactagctttccaaaatatcttacctaaaatttagtcaaatacaagattatgtttatttttattatccttctctctaaagcttttaaaactgcaagaacgagtgctcaataatgttgtcatccatttgcttggagatgaagaccccagggtgcgacatgttgccgcagcatcactaattaggtatttaccaatattttatctcttttccttttttggttgaagtactaaaagatacgagaatggaaagagagggaagaattcaaaggatgtagagcagtattcctgaatctgagctcatttcagccattctattcttaaactataatgaaaaaaaaatccaaaaaagtctaaaattataattaaaaaaacaacaaaatactaactgtccattgtaaaaagtaatgcactttcattgtaaaaattttggactatagagaatagtactaagaagaaaaaaaaaatcaccttcaattctgctgccacctggaggtaatcactgttaatattttgctatatactctatgagtttcttgttcaaaatcaggtcaaaattacatgcaattttgtaatctgacaatttccacttaatattttattagcattttcctgttatgaaacagtaattttagttatgggtcgttgttttgctatgcggttgggataaaattttatatactttttttggcaattacttattatacataaatgtttgtgtatagttttctttttctgagaattcctggaagttgagttaccaggcccggctttgaatttttttttttattttttttttgagacagagtcctgctctattgtccaggtgctatctcggctcactgcaacctctgtctccctggttcaagcgattctcctgcctcagcctcccgagtagctgggattacaggggcacaccaccacgcccaattaatttttgtatttttagtagagacagggtttcacgatattggccaggctggtctcgaacttctgaccccgtgatccacctgcattggcctcccaaagtgctgggattacaggcgtgagccatggcgcctggccaggctttaaatttaaaacaaatcttctaatagctttatggaggttataatttacatttcttgaaatgtactcactttgagtgtatagtaaactccaattttatcacatttctgtcaccccaaatgtatccttgtgcccatttgctgtaacctccggttcctgccccaactcctaggcagccactcatctattttctgtcccttaagatttgtgttttcgccaggcgctcatgcctgtaatcccagcactttgggaggccgaggttggtggatcacttgaggtcaggagttcgagaccagcctggccaacatggtgaaaccttgtctctactaaaaatacaaaaattagtcggatgtggtggcacacgcctgtaatcccagctactcgggaggctgaggcaggagaatcacttgaacctgggaggcggaggttgcagtgagcagagatcgcgccactgccttccaacctgggcaacagagagagactgtctcaaaacaaacaaagatttgtattttctggacattttatagtactggggtcatagtatagatggacttttgcatttggcttcttttacttaattgtgagattggttcttgttgtagcatgtatcagtagtttgttcatttttattggcgaaagtattctattatatgaataataccatattttatctatccatcagatggatattatagagttcatgttttggctaatttatgaattatggtactgtgaacatttgcctgcaagattttgtgtagacatgtcttcatttctcttgagtagatcacctagaagtggatttttaaataattttggtacttactgtgaaactgctcttcaaaaacataccattgttccttccttccttccttccttccttccttccttctttccttcctcccttcctccctcccttccctacttccctctccctttccctttcccttccccttttcccttccccttcccgcctgcctgcctgcctgccttccttccttccttccttcgtttctttctacatatacacatttttttaaatttcaatggtttttggggtacaagtggtttttggttacatggctgaattttggttacatggtgaagtctgagattttagtacacctgtcacccgagtagtgtaccttgtacccaatatgtagttttttgtccctcaccttccagccttccgccttgtgagtctccaatgtccattataccacactgtatgcccttgcgtacccacagctcagctcccacttctgagaacatatagcagaaacatgccaaagtatactcccactaccagaatgtgattgtgcctgattcttctcaccagtacaaatatttcaaaaaaagttaaatatgtatcagttttttgggcagaagttgatacttctctttatttatttattttttttgagatagggtctcattctatgatgcccaggctggagtgtggtggtgcgatctcggctcactgcagtctctgcctcccaggttcaagtgattcccacgtcagcctcccaggaagctggaattacaggcgagggccaccactgccagctaatttttgtattttttggtagagatggggtttcaccatgttggccagactggtctcaagctcctgacctcaagtgatccacctgccttggccttccaaagtgctgggattacaggcgtgagctaccacacccggctgatatttctttttaaaataacttaccttcttttgaaagtaatacatgtttaatgaacagaatttaaggaaaatataaaaaaacgaaataatctttgtaatcaaactactgaaaagaaaaccaaagttacattttggtgcatattctttttcattttcatcattgtaatttgcatttctttgattacttgtgagacactcctttcatttacttaataggtttatatgacttgcctattcagagattttgcagctttaccattttctgcaaatgatagcaacttctttttgtttgtttgtttgtggagacagagtctcgctctgtcactcaggcaggaatgcagtggtggaatcttggctcattgcaactattgcctcctgggttcaagcgattttcctgcctcagcctcccaagtagctgggattacaggagtgtgccaccatgcccggctaatttttgtatctttagtagagatggggttttgccatgttggccgggctgatcttgaactcctggcctcaagcggtccccctgtctcggcctcccaaagtgctgggattacaggcgtgagccaccgtacccagccagtagttacttcttatattctagaaaaaattctactcatgatcaagtctccatgaggaaagagactttaattgaagatcatggggcttgcagaccaatatgataaaatagttcattgtttctaaaagtattactgagtgttgatggcagatatgaacccttttgtttttgtaggaaaatgttacccgtattctccatttgaattcagtttagatttgttaggaatcgcagcttaagctttgccatctgggagtgtttgggacagttttgcagacaaaattgcaaaagtgcctaaggaatgcagctggcattcagacctgctctgtgctcagtactctgtggacagacactgttcagcacttgttgatcagaaggtttagaaagagaactttcaaagttggtttttaattaaagcatttaatagtgtaaatagaaagggattaaattttatgacagacaaaagaaagtacagcacccagctgggcgtgggggctcacgcctgtaatccagcactatggggggctgaggtgggtggatcacgaggtcaggagttcaagagttcaagaacagcctggccaaggtgatgaaaccctgtctctactaaaactacaaaaattagccgggcgcggtggcaggcgcctgtaatcccagctactcaggaggctgaggcaggagaatcacttgaacctggacggcagaggttgcagtgagccaagattgcaccattgtactccggcctgggccacagagtgacattctgtctcaaaaaaaaaaaaaaaagaaaaaaagaaagtacagcacccagttatgtccgagtgggtgcatgagagtgaccctgagattggagacaacgctgtcacgtgcttgaagaacgccacctgagaaagggggcgagaagtggtgtccgctggtaaccagaggtgttggcttagccatctgcagggaggagggtggtctatcacaggtgagtttcatctactttcttaagcaaattaaccttacttttgtgttaggcttgtcccaaagctgttttataaatgtgaccaaggacaagctgatccagtagtggccgtggcaagagatcaaagcagtgtttacctgaaacttctcatgcatgagacgcagcctccatctcatttctccgtcagcacaataaccaggtatgctgacccagtggcatcttcacattgtcgggaaaatgccctttcctgatgcctttctttaggctttaattgaaaacattttattttctagaaaaaagcttcagctcaggatgtttgagtgtaggtcagtcctttgataggatattatcattttgaggattgaccacaccacctctgtatttaagctctgccacaatcactcagctgtgacactgtaaatctcttaatagtttattacattccatgtgctgacagttgtatttttgtttgtgacacttacgtattatctgttaaaacattttcactttagttgtgttacctttaaagaggattgtattctatcatgcctgttgattttttggtgagcgggctattaaagtcagtgttatttagggttatccactagttcagtgatttgcgagattatcattcacatttattgtggagcttttgaatatcgtgtcaaatggccacatatatcccattcttatctgcttcttaggtgagtgggacacagtgctttaatgaagctataatcttcagaattctagcttgcagagaagattgcagaagtgataagacttgtgctttttaattttgtcttttaaatgttattttaaaaattggctttatatgatactctttttttctgctgagtaacagtgttttacaaaacttggactaaatgacttctaagcttaaatgatcacttgatgctttttttctgaattaggaactcagcttatcaaatatcaaagtcataattcctgaataaataacgtcttttttcatgtaaagactgctttaaaaaacacatggaaggctgggtgcggtggctcacgcctgtaatcctaacactttgggaggcccaggtgggcaggtcgcttgagctcaggggttcaagaccacccagggcaacatggcaaaacccacctctactcaaatacaaaaaattagccaggcgtggtggcgggcccctgtaatcccagctactcgggaggctgagggatgagaatcacttgagccccggaggcagaggttgcagtgagccaagattgtgccattgcactcccagcttgggctacagagtgagactctgtctcaaaaaaagacacacacacaaacaaaaaaaacatggagacatttttttggccaccttaatatttcccctcagataatttcctttgtttaaactcagaactggcattttctctcttggagaagattcaggacaaatactcctttaagataagtagaagcagtgaaagaggatttgattatcaggaatttgataagcttagaataaattgttgcttcttaatgtcatttcagaagatgaatatttattaatagatgccaactgagatatcattaaaattgattactaactactacttggaaaagtctcccagttccaaacttcagcaggcctcttgacaattcagctgtggtcaattgggtcttgcgtgatagatacaatgaccaattgtgcagcagagtgtgctgcttagctgcctattctgttagcattcatgtgttaacttaaaatcataatctccttagttttgttgagtgtctccgtggacaagacactgtgagggatacaaaatcagattggctttattcaaaccactggggtattataattcatttataatttattttattttttgccttttttccatgtgttctaaaggaattagagtttgtatataactataatgggggatagaaattgacatgtgccatgaagggaatgcaaaaaagtgccgtgggagatgagaagtggagaaaggaatttcttttttcttggaagcaggaataacttcatgaagcatgtatttcaacttaaacagatagtaggcaacgctgtaaggggagtatggctgcagcaaaagtgttcggggcagactgggaggaagggagggaataaattcagccattgttatggaataatgatcaaaatttattttcagcccgtttcacttaaaagttgagactgcttaactttttttaatctttaatcttaaacttttaaatgccatttgatctttaaaaatatatgttttaatagtgtattttaagtctctatatttttgttattagaatatatagaggctataacctactaccaagcataacagacgtcactatggaaaataacctttcaagagttattgcagcagtttctcatgaactaatcacatcaaccaccagagcactcacagtaagtctctttcttgatcggtcttactgacattgtaatagtttttggtagcttgtatggccagttagttgtatggtcatcttacggtgaggtgcttgtcttacagctcttacttatccatgaggcttgctaagaaattgtgcttctgtgaaaagaatctcagcttactccaggaatgtaaatgactatgttttttctgattattaaagtaatacacgcccaaaataaaaaaattcagccaatttaggaagacacaacaattaaaataagccaggcatggtggctcatgcctgtaatcccagcactttgggaggccaaggttgggggctcacttgaggtcaggagtcggataccagcctggccaacgtggtgaaaccccatctctactaaaaatacaaaaattagctgggcgtggtggcgggcgcctgtaatcccagctactcaggaggctgaggcaggagaatcgcttgaacctgggaggtagaggttgcagtgagctgaggtcaagccactgcactccagcctgtgcaatagagcgagactctgtctcaaaaaaaaaaaaaaaaaaagaaaagaaaaaagtaaactactgtcacctgcattggtaatgtatcagaagtttaaaatgtctagattataattaactcagtgacctggtaatatatactaagggaaaaatatttataatttacatttttacatttttatttttttaattttattattttttttttgagacagagttttgctcttgttgcccaggctggagtgcaatggcatgatctcagctcaccacaacctccacctcccgggttcaagcaattctcctgcctcagcctcctgagtagctgggattacaggcatgcaccaccatgcccggctaattttgtatttttagtagagacagggtttctccatgttggtcaggctggtctcaaactcccaacctcaggtgatccgccctcctcgaccccccaaagtgctgggattacaggtgtgagccaccatgcctggccttacatttttataataagaatttatgttgctgacattagaaaagaaccataatatccaagaatccaagaataattaaattatgtacatatgctagtatatagtgtgatgctttggagaatttttaacaatatggagatgtataatctggattgtaatattgagtgaaaaaaggcagaatacaaacctggtgggggtatagtcggatttcagttaagaaaaataatatttacatatatacatttctcacactggcagataatcaccaagataaattttgggattgtggatgatttttttcttctttatatttttcagatattctcaaattttctaaaatgagcaagtataacttttgttatcagaaaaaaataatatacaaaagtaatgttaatttgctggtgaccaggttaaacctttttatttttattttttgagatggaatctcactctgttgcccaggctagagcacagtggcatgatcttggctcactgcagcctccgcttcctgggttcaaatgattctctggccccagcctcctgagtggctggaattacaggcgtgtggcaccacacctggctaatttttgtatttttagtagaggtagggtttcaccaggttggtcaggctggtctcgaactcctgacctcgtgatccacccacctcggcctcccaaagtgctgggattacaggcgtgagctactgcgcccagccagacctttttattttatttgacaaaagaaatacttccatgttatagaagactaaatattgtttgggctgtctgcagtatggtcttcccttgatttgttcaaaatatcgtaaactttgcttatttatttttattgtggccgactgtgtcgggcactgttgtaggcttgggatggaaaaacaggattcctgcccttagggtttctgcaggctggtcagggagacgatgtggtaagctggagctcagctcctaaggatgtgcaggggcagttgagaggcggaagggtgggagatcattccagggtgtgggcagcacaggaacctctcttcattgggatataattgccattctgataacacgtgtttgaggtgtctaaagtaggaagttgtaccatggtgggacagatatcctgtggttatcatacacagatctcagttttcttctcattgtttgtactttttataaagggtaacaggagatataattcaataaacctttgtggtgtttgggtgtgattttattgtttctttcttctcagtttggatgctgtgaagctttgtgtcttctttccactgccttcccagtttgcatttggagtttaggttggcactgtgggtatgtattttcctcagtatatattaatagttgtctacaacagtatgacataaacatagttattaggatgccctttttctttctttttaagtcttttatcaatttggctttttggaaaaatatctgatggaatacttgtttctgctatattagctgtgtgagactagtgacaggagctgtgggaaatgaatgccaaatgttcttaggcattgatgggaatttcagggtgtggtcttcaagttcatttaagggaattttcatatgctggcaaaaggcttttctcattagcttgactctttccaaaattatttgctgtgaattagaagtttaggaaccttttttcacttaattgtgacctagcatacgaaatggtgatgatttaggaactactgttcttgtattaacagcttttatttaaaaatgattttcctccagtagatggccctactagcatctgggaaataatttcaagtcttctccagcattcaggaataggctttcattttgtgtatcaattactgagaatgattttggtgactcacatcacatttgagaagtaaacctgcagatttcttgtgtgtgtcagcaaatgaccaactgatatttgcttgaagtggattacattatctgctctagaatgattgctttcccaccttcctcacatacagactgagcagctacggtttctaatcataggtctggcactagacttcacttctgggcaactttggcattggagtaaaatgtattaatttaaagaaagttaaaaatccgttcaagtaaacatacagttctaatactttttacaatttaaaatatagatttaaatgataaaataaaaaagaaaatatgggtagacaccataatcctcgtttctgcatctgttcacaaggggttgatatttatgagttctattctccatatccattctatgttctcttaatgctcagtcagcacctcaggtggttggagttcaatgcttggtagtttgacttacactgtcttttctaggggattgagccctgggtagtcctgcttatttgaggttgcaatttgtctttcaataacttttactacaagatatggcgtgttaaaggataccattggggaaccaacataataatatcaggaaaactaaccacgtcagacctgccccattgtgtatcaagtacactatttttccatagtaataaagagttcaccccagccaattctcttttattttgtgcctgtttactcaatggcattaacatgcccaaatgtctgggtagctgtctcatctccagttcagcagaaccattgtcatatgccctagtaaaagcattccttcattggacacttaggccccaatactttcattcagatctactacctgatttcatttctcaaatgatttttatggagctctgatttataggaaagatgttagttgattaaaaataaaacaatttctgagctggtataaaatgtattgtgacatgccttcctcttggaattgcaagagaaaggaagactgttgtttgcttaaaaattgtctataatttgactttgcaaatgtctgcttccagagtgcctccactgagtgcctcagatgagtctaggaagagctgtaccgttgggatggccacaatgattctgaccctgctctcgtcagcttggttcccattggatctctcagcccatcaagatgctttgattttggccggaaacttgcttgcaggtactggtactgagttgaaacagggactccaggacttggattttgatttccttagggggaatgggggtggtgagcatatgaggggaaaatactataaggtcattgccagtgatggcttgtccctttagtcaaatttcagatgttacctatatgcataaacacatgcagttggcagctgttctgtgctgagtattttaaagtagcctcttcccaatatagcccctcagttaactacaagtaaactcattttgaatttcattttaatgggcaccatatgccagtactccctcgggcactgggatgttaagaaagtataatgtatggacttcattctcaagttagttttagattagagggggatacacgtaaacaaaagtgcagtggtcacacagagtggccctaatcactctccttgggcagatttatgggctggtaggaaagagcacaacacggagagggtgtagcaccttggcgatgataatggaggatgtggccagcaaggaagacggagtccattgaaattgattttgggagaagttgccaatctccatgaaagaattggggcctgtgctatttgcttcagggggctataggagagtttcgtgaaagggactaaaagatgagtattttaataagatcattcatccaacttgaacatgggctggaggagaaggtagggagactcaggagattaatgttgatgctaaggcaagataatggctttgggactgtagggaagacactgattgtaagagaatgaaggaggcagaattgccaggcctggttcaccaactgaacttcggttgtgaagacaaagaaacctgggatgacttcacatcctgggcaggtgtgtggtggtgacagtcatggaaattgggaacacagatttgtgcgggaaacatcagtttcagtttgagtttggcttatcagttgaatatcaggcacagatgtctggccaactctcaacatagggtcttaaatgacttcagttccccaagcaatttgtccttcccatgctattggggtggagaggtaatgtctgtgcccatatcacagccagtgctcccaaatctctgagaagttcatgggcctctgaagaagaagccaacccagcagccaccaagcaagaggaggtctggccagccctgggggaccgggccctggtgcccatggtggagcagctcttctctcacctgctgaaggtgattaacatttgtgcccacgtcctggatgacgtggctcctggacccgcaataaaggtaatgtcccacttgggtgctggattcatacagccttaatgactatgggtttccagactacctttgtttagtaatctgtcccttctttattctctttttgctttaaatgaacaaaattgctcagattgtgacactaaatttaacatcaaaatgtgaccatgtggatgggtgcagtggctcgtgcctgttattccagcactttgggagactgaggcaagtggatcacttgaggccaagagttcgagaccagcctgggcaacatcacgaaaccccctctctactaaaaatacaaaaaattagatgggttgggccgggcgtggtggctcaagcctgtaatcccagcactttgggaggccgaggtgggcggatcacgaggtcaagagatcaagaccatcctggctaacacagtgaaaccccgtctctactaaaaatacaaaaaaattatctgagcatggtggcgggcgcctgtagtcccagctgctcgggaggctgaggcaggagaatggcgtgaatccgggaggcggagcttgcagtgagccgagatcgtgccactgcactccagcctgggtgacagagcgagactccgtctcaaaaaaaaaattagatgggcatggtggtgcgtgcctgtaatcccagctacttgggaggctgaggcaagagagttgcttgaacctgggaggcggagtttgcagtaagccttgattgtgccgctgcactccagcctgggtgacagagtcagactctttccaaaagaagaaaaaaatgtgaccatgtgttttatagctcttttagtatcatcagtcactgttatccctaagagggaaatacctagctttagttttaggtttccagcattagccaagaaagctcagaattgatgttcctggccaagtacctcattgctgtctccttaaatcttggttaatggctactgtcctggctagcatagttatggagcatttccatggttgtagaatgttctgccaatctcagggacagttttgcttttctgtgaagcaataaaatcaacttcaaaacaaatgttaactatttgtacaatggatttaagatagaccagttcacatacttttttttttttttttttttgagatggagtttcattcttgttgcctgggctggagtgcaatggtgtgatctcagctcactgcaacttctgcctcctgggttcaaacgattcttctgcctcagcctctcgaggcagattacagctgggattacaggcatgcaccaccacacccagctaatttttttgtagttttagtagagacggggtttcaccatgttggtcaggttggtctcaaactcctgacctgaagtgatctatccgcttcggcctcccaaagtgttgggattacgggcatgagccaccacgcccagcctaagatagaccagttcacttactgtttatatctgattactctctctttgccttgtcttctacctttaaaaatctccctactaacttcccattctcctttagctgccatcagtcttctcccttctctgcaaacatctctggagagtcccagcctcagcccacagagcttcccactgctctgaggtggaccttgtttgcaaggcttctttggctctcttggcctggaccctgtctactacttcagccatccttccttaacccctgctggtggtttctgttgccacactccatagcagcgtttcccgcccagatcatgtctttacatctctgggcactgctctggtcctgcctgcctttccctctttgtatcctgcaggctgctacccccatcttgagtgtcctcttcagttggctttcagagggcctcctgggtgttcccttacccacttgccactccccagtcactgggttcagtccttcctgcccaccagcacatgctttctaggctctgtcctaggccgtcttctctctttgtagtctctgggccagtgctgttctagagagtggcagaattttctataaccatggcagtgctccatagctatgccaggcaagacagtagccactaaacacatatagctgttgagcccttgaaatgcagctagtgtgactgaagaactgaaccccgattcggtttaattttcattaaatttaaatttaaataaccttatgtgggtagtggctccagtattgggcagggcagcctgagagtcggggctgttctcctgtcttcagtgtctagatgagggacctcagaggacctgtctctggagctgcagttcaatgtagccagctgccccgtgacacttacatatagctgatttgtggatatgtcagacacggtgtgatgagctcagctttctgtcctcctccccacatctgcccctgccccatttaccccactttgtgtcttatcaagctagaaacaggtcaccacaagtcttcatttccactcaccaagtcttttgtttcccctactaaatattttgcgagaagaaagtgtgtacctttgtattcacatacatgtacatgcacatatacatgcacatatgcaggggtccccaacctctgttaaaaaccggactgcaggccgtgcgtggtggctcacgcctgtaattccagaactttgggaggccgagaccagtgcatcacaaggtcaggagatcgagaccattccggctcacacggtgaaaccccgtctctactaaaaatacaaaaaaaaattagccgggtgtggtggcgggcgcccatagtcccagctacctgggaggctgatgcaggagaacggcgtgaacctgggaggcggagcttgcagtgagccgagattgtgccattgcactccagcctgggcgacagagcgagactctgtctcaaaaacaaaacaaaacaaaaaaaaaaaaaaccaggctgcacaggaagaagtgagcaagcattaccatctgagctctatctcctctcaggccagtggtggcattagattctcataggagcgtgtatgagttcgttctcacacttctgtaaagacatacctgagacatataaagaaaagaggtttaattggctcacagttctgcaggctgtacaggcttctgtttctgggaaggcctcaggaaacttgcagtcatggcagaaggtgaaggggaagtaggcacatcttcacatggcccacaggaaaaagagagaaggagagagagagagagacagagagagagagagaaaaagaaagattgagagggagagaggagggagaaaggagagtgcctgtagggggagttgctacacaaaggagcaccagggggatggtgctcaaccattagaaactacccccatgatccaatcacctcccaccaggccccacctccgacactggagattacaattcagcatgagatttgggtggggacacagagccaaaccatatcagagcatgaaccctattgtgaactgcacatttgagggatctaggttgcatgctccttatgagaatctaatgcctgatgatgatttgaggtggaacagtttcatcccgaaaccatcccccgccaaccctggtttgtggaaaaattgtcttccacagaaccggtccctggtgccaaaaagtttggggacctctgcacatatgcatgcacctgtacatggacacataatacatgtacatatgcatactttatattctctgccacttctggtccagactgatatactatctcatttggattactgcactagccttttgttttggaaacagcattttttaaaaaatttaatttaatttttttgagatagggtgtcattctgttgcccagcttggagtgcagtgtcatgatcatagctcactgcggcctcgatctcccaggctcaagtgatccttctgcctcagccttctcagtagttgggactacaggcatacccaccatgcccagctaattttttgatttttttttttttttgagacagagtctcagcctgtcgcccaggctggagtgggttggcgcgatctcagctcactgcaacttctgcctcccaggttcaagtgattctcctgcctcagcctcccgagtagttgggattacaggcgcctgccaccacacccagctaactttttgtatttttagtagagacggggtttcaccatgttggccaggctggtctcgaacttgtgacctcgtgattagcccgcctcggcctcccaaagtgctgggattacaggcgtgagctaccgctcccagccaggaaacagcattcttgagataattcatataattcacccatttaaagtatataattcattctctttagtatgcccacagagttgtacagccatcaccagaatcagttttagaacccataaaggaactctgtactctttacccaaaacctccatgcctccagctgcaggcagccactaacctgccttctgtctctgtgactctacgtcttctggacattactgtggatgggctcatacagtcagtgagcttgtgactggtgccttctaccaagcagggttttcagtgtagcagcctctctgtttttcttttttttttaaattgtgacggaacttctgcctcccgggttcaagcgattctcctgcctcagcctcccgagtggctgggactacaggcccatgtcaccatgcctggctaattttttttttttttttttttagtagagatgggtttcaacatgttagccagggtggtctcgatctcctgacttcatgatccgcctgcctcggcctcccaaagtgctgggattacaggcgtgagccaccatgcccggctaacctttcatttactgtctgcatttcttccctgatgccttccagtccatgcacccgattgtagccattcatcctattatggtttaaggtgactgtcttagtcagcatgggttgccataacaaaataccatagcctgggtggcttcaacaacagaatttacttctcacacttctggaggttgggaagtccaagatccaggactttcgccttgccctcatgtggtgagggggtgaggaagctctgtggggcctcttatatatggatgctaatctcattcatgaggggtctgccctcatgacccagtcacctcccaaaggccccacctcctaataccatcaccctggtaattaagtttcagtgtataaatttgggggactatagacattgaaaccataacaagcacttttctaagatcagggagtgagtaagtagcagagctaggacctcaattccacatgtcagtcatcttgccttcactctgctccatgatggctgcctcctagagcattgggagtctcgatgttctatatgctctcatgtgttgtgtattggagatagttgaggctttatgaatacatctggatttgttgacttctagctttgctggtaaccagctgtgaccttgaataagttacttcatctctgagcctgtttcctcttttagaaacaggagtttaaaatgctgctttgggttgggcacggtggctcatgcctgtaattccagcactttgggaggctgagatgggaggatcactggagcttggagttcgagaccagcctgggcatcatagtgtgagatcctgtctcctcaagaaattaaaaaattagctgggtgatgtggcgtgtgcctgtggtcccatctactctggaggctgaggtgggaggattgcttgagcccaggaggttgaggctacaatgaaatatgattgcaccccatcctgggtgacgagtgagaccctgtctcaaaaaagaaaaaaaaaatgctgctttgtacccctttcatgtcatggcgtcatggccaacatagaatgccctggttgtttgctgttggagggcatgggcctgggggctccctgagggctccttccatcttcaactcattctctgtgcacctgttaggaagttgtgggccagtccctaccatgtatcattgtgtgggtaaaagtaaataaaatgtgtacagtgtctgaactgtacatatcagggtccaagaacaaaatgagtgacatgggttagctctttttaataaatggtaaaaccaaatattctaattttcagttttgttatacttccatcacatgtttttgtttttttgttttttgtttttgtttttctattttaggcagccttgccttctctaacaaaccccccttctctaagtcccatccgacgaaaggggaaggagaaagaaccaggagaacaagcatctgtaccgttgagtcccaagaaaggcagtgaggccagtgcaggtaggaaacagcgtggggaagggagggacatgagtgcagcatctgtcatgtagaaacataggatttaagtaacttggtgttttagagaaataaatataatacacatcagtaaagtgagagaaagtttctccaggtgcggttcaagatattagaaactaatgactgatgtacacagaccaccttttggtctgaagcatttctaagtgccactggctgacatgcagcccctacagcctccaggcttccagccctagcatggagcatcactctcctatgcttccctggttgcaggtgatggctggagaggcctcctgattttcagtaagggaagtggtgtagatgcttaggaatagatgtagtgagtgaaaaaactgattctgatatgtcaaaaattctgattggaaatggaatatttacatttggaagagctaaaggcgagagaaagtggggataaagtcatctgagttggaggagcttaaaccattcacaagtttggaggacctttttttacccatgaaaaggtcagaacagaaggggctaggatttaggtgtgactgcagtttattgaattcccatccatactgctctcggtgggcagtggcaggggcaggagaggagcctggcaaagcatgaagtgactgctgctgcctctgctatctgggacgcctggccacctgtctgtacagtctccctccagacccattctcacgctgtctcttggcacccaggggccagtgatggttctcccatttgttttgtgtatatagcatttatatcaaggctatttatttatttatttattttatttatttatttttttgagacagagtctcactctgtcacccaggctggagtgcagtggtgcaatctcggctcagtgcaagctctgcctcctgggttcaagcaattctcctgcctcagcctcctgagtagctgggactacaggtgtgcaccaccacacctggctaattttttgtattttttattagtggagacggggtttcaccttgttggccaggatggtcttgatctcctgacctcgtgatccgtccacctcagcctctcaaagtgctgggattacaggcatgagtcactgtacccggcctatttatttatttttaattgacaaaattgtatatatctgtaatatacaacatgatgtttgaaatatgtgtacattggccaggcgtggtggctcacacctgtaatcccagcactttgggaggctgaggtgggcggatcacgaggtcgggagttcaagaccaaactggccagcatggtgaaatcctgtctctactaaaaataccacaaaaaaaaaaaaaaaaaaaaaaagccgggcatggtggctcgcgccagtcgtcccagctacttgggaggctgaggcaggagaattgcttgaatctggcaggtggaggttgcagtgagctgagttcatgccactgcactctagcctgggcgatagagcgagactccgtctcaaaaaaaaaaaaaaaagaagaaatacatatgcattgtggaatggctaattaacctgtgcatcacctcacgtatcattgttttgtggtgagaacacttaaaatctactctttcagtgattttcttgcatatggtacattgctattaactgcagtcaccatgctatacagtagatctcttgaactcattcctcctgtctataaatgaaattttgtatccttgaccaacacattcaaggttttttttgagatggagtcttcttcacccaggctggagtaccatggcacgatctcatctcactgcaacctccgcctcccaggttcaagcaattctcctgcctcagcctcctgagtagctgggattacaggcacatgctactgcacctggctaatttttgtatttttagtagaagtggagtttcaccatgttggccaggctggtctcgaactcctgacctcaagtgatccgcctgccttggcctgccaaagtgctgggattacaggtgtgagccactgcacccggcctcaagcgttttaaaagatgctcttttctaaggattgactgtagtacaggaggaagattgacctgttgaaaagcctcagcctttacaagtgtaaaattatcagtatattactatcatctttctgatgaattaaataaactaaggactccaagtcaaaagtcttcaaactgaagtagaatagttgtatatagtgcttggcactttaatatttagtatcggtttaatgataatgtttgtgcctttgccgtctttaaaacatttttacatcatccctgtttgattacttggtgtgctcatgaagttgttggccactaaggaatcttaggctcagagaggttctggaattggccagtggtccttgaatcagctgctcctatgattctctaactgatttctcacaaagcaaacaagcaatcataacaaaacaactgtgcacactgctcttcttattttgttatttaaaaagtacttaggctctacttatgtttgttagtcaatttctcattacttctagttaatcaaaaggtcagaggaaatacttgaatattttcatactagaatactttaaaaaatcatgatttccagtaatctctttaaaacttggcaagttattttgatctaaaagtttatcttttgtgtgcatatttttaaagcttctagacaatctgatacctcaggtcctgttacaacaagtaaatcctcatcactggggagtttctatcatcttccttcatacctcaaactgcatgatgtcctgaaagctacacacgctaactacaaggtatgggcctctgcatcttttaaaaatatatatgcacacatacttacgtctaatggatagttgatgtttttcttatgatttgtaggatgtataagccctttgagatatgagttacatttagttttttcaagtttgtttgtctttcagctttgtttatgatagcttctatcatacaggtgttttggattttcatattgtttgtactcacagctaagattgattacagtgacagagctaggatgtgcagccaggttatagggggaagtggccctggtggagtctggagggatccgtgtacaggcttccttccctcccgtgaggctcacacaaaaatacagcaacatgctggtcctgcaggtaccctctgcctaacatgagccacaattccagactcacagaagaaaagcaggtgttcggcataaaccatgtgtttcaaatagtctgggcatggtgagccacttgttatcagctagggaaagtttatgtcagcgtaagaaactgttcaccagatacccccaagagccagcctttctgtctagggatgttttagttttttagttcatttttttttttaactttaaaattttctgttcatctgcaatttgttagatatgaagtatgtgtctaatttaatttttgtttttggttgtccccaataatgtttacagaagaatttttctgcactaattggcttgagttacttacattctcatagttctctagtttcagtagtttcatttattattttgttatatcaatctatctgtctgctcatctattagaagcatccttgttttttttttttcttttttagacagagtcttgctctgtccccaggttggagtgcagtggtgcaaccatgcctccctgcagtctcagggctcaagtgatcctcccacctcagctcctgagtacctgggactaccggcatgtgccaccacacccagctaatttttacattttttgtagagacagggtctccctaagttgcctgggctggtctcaagctcctggcttaagtaatcctccctccttggcctcccaaagtgctgggattacaggtgtgagcaactgcacccggctacaagtatacttcttaattattgtagcttaatggtatttatgaggggatcagttcccctgttgttctttagaattttctggatattcttctttattgattttgggatgtgaacaatagaatcaacttctacttgtagattgatttagggagaacttatacctcagatgttaagtcaccctgtccagaatgtgggatgctttcctatttgttcagaactttttaaattacctcagaagcacatgaaatttaaaggattttaaaaaaaacttaaagattatttcacatagctcttgcacatttcttgataaatgaatcctcaggtattcctctgtttttgttactaatagttacttcttatgggttttttttcccctgaaaatcatttatcaaacgtatgtggcttattttctgaaggatgtttgataattttggaagatatgaaagtcttcatattttacaaggtttgaggtctctttaagctgcatggttctcatgtcagctcccaaagcagaagacggcatgttgaaaaatgccgtagagaagatacttcttttccacctgttttcaactcatatcatcttgaatttcagggcacctttccatgctcctagtgcttgctatctgtttattattttccttcctgaataccctgaactccagcatgttctgctgtaattctggcctccctggcatcttggactcctgtttcctttgctctgtcatccccgcggtcagctcctgctgcgcagcttctcagctgaagtgcgtttggagtgcctggcgtgtcttgctggatctttgagtattgcctctggtttccttggttccttctgctgagttgctcagcgtctccactccccatttcttgtgtggcccttcctgcactcctctgattccttttgtcttccctggtttcttgctttggtttcgagtctccacagaacttttgcagctcttctgaagacctggaagctttttcatcttaattctcatctcatgacctcttttcccttctttgagagctagaacttcccatggtgaacttctctttccagaattccatgccttcttttccctcccacttacctgttgtccaggagaggtcagattgctgtgcatattggaggagaaccctttcttccctgggctcttcatctcacatgacatcaccacatcacctcgttccttggaccctcagtggtgtcactgctggatttttctttcctttggctggccttagggcacacccaggttgactagcgtagtcatggtatttagatccactcacattttcagtttctgtgtctgtctcttgcctgcttctgacttcgcccagagaaagcttctctttcacaagggttcttagatttatgttcactgagcaccttcttttctgaggcagtgttttaccaatatttattttcctagtcagtctcgccttacctttcttgttatgcatgtctttggtcctgacccattctctgagtctgtaaaatagaattgctgtataatttaattacatgaaatcctttagaatcttaacacatcttacacctgatttaatattttattgtatccaaattgaaccaaccctatgtgaatttgacagtgatttctcccagggatcctagtgtataaggaataggacttagtattttctattttttgatataccacataccagatactgattatgatggacatttaacccttttttctcattatgaaagaaagttaggaattatttcttccagtagcgccagtgtaacctgaaagcctttgaaagagtagtttttgtatagctatctgaaaggaatttctttccaaaatatttttccagtgctgacaacaaacacgcagacacaccctgcaaggtgagtgtacggcgccgcacagtggaggcatctgctgcagccgtcgatgtttgtgtctttggttgtacattatgagatcgtgacagggccagtaaccgtgtgttctctccttcaccttcccaaggtcacgctggatcttcagaacagcacggaaaagtttggagggtttctccgctcagccttggatgttctttctcagatactagagctggccacactgcaggacattgggaaggtttgtgtcttgttttttctccttgggttgtggctggcacacttgatgtgcgtcttctgggctgagttcatctaggatggagcctggttctccagggtgcctccgggagactcctccctgccccacgtgcttgcgtcacaggacccaagtctgactctgccttagccatgaagtttagggggaagtttctatttgtattctatttttgtctgttatcatgtattagcttagacccagtttagtttggaaaatcagtgggtttcaaaatgtgtttgtagagtcctttatttcttaacttgaccttttcaagtggaaaggggcaaaacagacgggtaagggggcggggcgggaggtgtgacttgctcttttgtgcctgaggaagtaacagagctggggttgacagtcatattctctgacacagatagtctctgacttatctcacagaaagtcagcggcagagcctgagttaaaagtctcgtagattttctttttcttttttttggtggctaatttcagttttatttatatttgtttatttatttattatactttaagttctgggttacatgtgcagaatgtgcagttttgttacataggtatacacgtgccatgatggtttgctgcacccatcaacccatcacctacattaggtatttctcctaatgttatccctcccccagtcccctcactccccatgggccccggtgtgtgatgttctcctccctgtgcccatgtgttctcattgttcaatttccacttgtgagtgagaacatgcggtgtttggttttctgatcttgtgatagtttgctgagaatgatggtttccagcatcatccatgtgcctgcaaaggacatgaactcatccttttttatggctgtatagtattccatggtgtatatgtgccacattttcttaatccagtctatcattgatggacattcgggttggttccaagtctttgctattgtgactagtgccacaataaacatacatgtgcatgtgtctttatcgtagaatgatttataatcctttgggtatatgcccagtaatgggattgctgggtcaaatggtatttctagttctagacctttgaggaatcgccagactgtcttccacaatagttgaactaatttacactcccaccaacagtgtaaaagtgttcctatttttccacaacctctccagcatctgttgtttcgtgactttttaacgatcgccatcctaactggcgtgagatggtatctcattgtgattttgatctgcatttctctaatgaccagtggtgatgagcattttttcgtatgtctgttggctgcataaatgtcttcttttgcgaagtgtctgttcatatcctttgtccattttttgatggggttgtttgcttttttttcgtaaatttgtttaagttctttgtagattctggatgttaatcttttgtcagatgggtagattgcaaaaattttatcccattctgtaggttgcctgttcactctgatgatagtttcttttgctatgcagaagctctttagtttaattagatcccgtttgtcaattttggcttttgttgccattgcttttggtgttttagacatgaagtctttgcctatgcctatgtcctgaatgttatggcccaggttttcttctaggatttttatggtcctaggtcttatgtttaagtctttgatccatcttgagttgatttttgtgtaaggtataaggaaggggtccagtttcagttttctgcatgtggctagccagttttcccaacaccatttattaaatagggaatcttttccccattgcttatgtgtgtcaggtttgtcaaagatcagatgattgtagatgtgtggtggtatttctgaggcctctgttctgttccattggtctatatatctgttttggtaccagtaccatgcagttttggttactgtagtgttgtagtatagtttgaagtcaggtagtgtgatgcctccagctttgttcttctagcccaggattgtcttggctatgcaggctcttttttggttccatatgaagtttaaaatagttttttccaattctgtgaagaaagtcagtgatagcttgatggggggatagcattgaatctataaattactttgggcagcaaggccattttcacgatattgattcgtcctatccatgaacatggaatgtttttctatttgtttgtgtcctctcttatttccttgagcagtggtttgtagttctccttgaagaggtccttcacatcccttgtaagttgtcttcctaggtgtttcattcccttagtagcatttgtgaatgggagttcactcatgatttggctctctgtttgtctgttattggtgtataggaatgcttgtgatttttgcacattgattttgtatcctgagactttgctgaagttgctaatcagcttaaggagattttgagctgaaccaatagggttttctaaatatacaatcatgtcatctgcaaacagggacagttttacttcctctcttcctatttgaataccctttattgctttctcttgcctgattgcgctggccagaacttccaatactatgttgaataggagtggtgagagagggcatccttgtcttgtgccggttttcgaagggaatgcttccagtttttgcccattcagtatgatattagctgtgggtttgtcataaatagctcttactatgttgagatacgttccatcgatacctagtttattgagagtttttagcatgaaaggctgttgaattttgtcaaaggccttttctgcatctgttgagataatcatatggtttttgttgttggttctgtttatgtgatggattacgtttattgatttgcgtatgttgaaccagccttgcattccagggatgaagctgacttgattgtggtggataagctttttgatgtgctgctggattcagtttgccagtattttattgaggattttcacatcgatgttcatcagggatattggcctaaaattctctttttttgttgtgtctctgccaggctttggtatcaggatgatgctggcctcataaaatgagttagggaggattctctctttttctattgattggaatagtttcagaaggaatggtaccatctcctctttgtacctctggtagaattcggctgtgaatccatcctggactttttttggttagtaggctattaactattgcctcaagtttagaacctgttatcagtctattcagagattcagcttttttctggtttagtcttgggagggtgtatgtgtccaggaatttatccatttcttctagattttctagtttatttgggtagagatgtttatagtattctctgatggtagtttgtatttctgtgggatcggtggtgatatcccctttatcgtttttattgagtctatttgattcttctctcttttcttctttattagtcttgctagcggtctacctattttattgatcttttcaaaaaaccagcacctggattcattgattttttttggagggttttttttcgtgtctctatctccttcagttctgctctgatcttagttattttttgtcttctgctagcttttgaatttgtttgctcttgcttttctagttcttttaattgtgatgttagggtgttaattttagatcttttctgctttctcttgtgggcatttagtgctataaatttccctctacacactgctttaaatgtgtcccagagattctggtatgttgtgtcttcgttctcattggtttccaagaaaatttttatttctgccttcatttcgttatttacccagtagtcattcaagagcaggttgttcagtttccatgtagttgtgtggttttgagtgagattctcaatcctgagttctaatttgattgcactgtggtctgacagacagtttgttgtgatttctgttcttttacatttgctgaggagtgttttacttccaactatgtggtcagttttagaataagtgcaatgtggtgctgagaagaatgtatgttctgttgatttggggtgcagagttctgtagatgtctattaggtccgcttggtccagtgctgagttcaagtcctggatatccttgttaattttctggctcattgatctgcctaatattgacagtggggtgttaaagtctcccactattaccgggtgggagtctctttgtaggtctctaagaacttgcttcatgaatctgggtgctcctgtattgggggcgtgtatatttaggatagttagctcttcttgttgaattgatccctttaccattatgtaatggccttctttgtctcctttgaactttgttgatttaaagtctgttttatcagagactaggattgcaatccctgctttttttttgctttccatttgcttgttagatcttcctccatccctttattttgagccaatgagtgtctttgcatgtgagatgggtctcctgaatacagcacaccaatgggtcttgactctttatccaatttgccagtctgtgtcttttaattggggcatttagcccatttacatttaaggttaatattgctatgtgtgaatttgatcctgtcattatgatcctagttggttattttgcccgttaactgatgcagtttcttcatagcgtcagtagtctttacaatttggcatgtttttgcagtggctggtactggttgttcctttccatgtttagtgcttccttcaggagctcttgtaaggcaggcctggtggtgacaaaatctctgcatttgcttgtctgtaaaggattttatttctcgttcacttatgaagcttagtttggctggatatgaaattctgggttgaaaatactttttttaaagaatgttgaatattggctcccactcttttctggcttgtaggatttctgcagagagatctgctgttagtctgatgggcttccctttgtgggtaacccgacctttctctctggctgccctttccttcatttcaatcttggtggatctgatgattatgtgtcttggggttgctcttctcgaggagtatctttgtggtgttctctgtatttcctgaatttgaatgttggtctgccttgctaggttggggaagttctcctggataatatcctgaagagtgttttctaacttggttctattctccccatcactttcaggtacaccaatcaaacgtagatttggtcttttcacatagtcccatatttcttggaggcttggttcatttcttttcactcttttttctctaatcttgtcttctcgctttatttcattaatttgatcttcaatcactgatatcctttcttctgcttgattgaatcggctgtcgaagcttgtgtatacttcacaaaattctcgttctgtggtttttagctccatcaggtcatttaagctcttctctacactggttattctagccattagtctaacatttttttcaaggtttttagcttccttgtgatgggttagaacatgctcctttagctcggagaagtttgttattaccgaccttctgaagcctacttctgtcaattcatcaaactcattctccatccagttttgttcccttgctggtgaggagttgtgatcctttggaggagaagaggtgttctggtttttggaattttcagcctttctgctatggtttctccccatcattgtggttttatctacctttggtctttgatgttggtgacctacggatggggttttggtgtgggtgtcctttttgttgatgttgatgctattcctttctgtttgttagttttccttctaacagacaggcccctcagctgcaggtctgttggagtttgctggaggtccactccaggccctgtttgcctgggcatcaccagcagaggctgcagaacagcaaatattgctgcctgatccttcctctggaaacatcgtcccagagcacgaaggtgtctgcctgtatgaggtgtttgttggcccctactgggaggtgtctcccagtcaggctacatgggggtcagggacccacttgaggcagtctgttcattatcggagcttgaatgccgtaccgggagaaccactgctctcttcagagctgtcaggcacgtatgtttaaatctggagaagctgtctgctgccttttgttcagatgtgcccttcccccagaggtggaatctagagaggcagtaggccttgctgagctgcagtgggctctgcccagttcgagcttccctgctgctttgtttacactgtgagcatagaaccacctactctagcctcagcagtggtggacacccctcccccagccaagctcctgcatcccaggtcgatttcagagtgctgcgctagcagtgagcaaggccccatgggcgtgggacccgctgagccaggcacaggagagaatctcctggtctgctggttgtgaagactgtgggaaaagtgcagtatttgggcaggagtgtactgctccttcaggtacagtcactcatggcttcctttggcttggaaagggaagtcccccgaccccttgtgcttcccaggtgaggcaacaccccgccctgcttcggcttgccctccgtgggctgcacccactgtccagcaagtcccagtgagatgaactaggtacctcagttggaaatgcagaaatcacctgtcttctgtgtcgatctcactgggagctgtagactggagctgttcctattcggccattttggaagcatcccttgttttttgaggtggagtcttgctctgtcgcccaggctgacgtgcatcggcacaatctcggcccactgcaacctttgcctcctggtttcaagcgattctcctacctcagcctccggagtagctgggattacaggcacctgccaccatgcctggctaattttttgtatttttagtggagatggggtttcaccacattggccaggctagtctcgaactcctgaccttgtgatccacccacctcagcctcctagagtgctgggatcacaggtgtcagccaccacgcccagccatattttcagatctccctctctttgccctaaaccactgtgcttaataagtagtttttagtggccagcagtctccatgtataacacattttagcaaaatggaaaatactatatgttttaaatttgaacgtgagattatactgaaataaaaatcatctaactgggattctttaaatagtaagattttcttttttgtatgtgggtttttttttaaccttattattatgactgtcatatatagaaatggctgtttttcagttacagtcagtgaatgtatcaaatgctgccttatccaaataataaaagtaaattattaataagtcacaatttaatgaagattgatgttagttgatctttatattcttgaaatcagccatatggttgtgtgtgtatgtatatatttttaaaggtacataaagataataagctcatctctgaaaatttttacatttggcataagaataactggataattaagcatcttattctctggcctgtgtctttacagttaaaggtagatttactcacctctccttttttgtttttctaagttcatcttttttgctgtttcaagacagaggcccattttagctttctcgcatatccttttgtttgtactttggaagcctcacctgcttaattgttgagtttttatccgtggtcttttagagggggatatgtagggtagaagctttcacaggttcttgtttgcacttggcccctgactgttttgaggaatctccctcactgactcacagcatggcaaggtttcagatctctttctgccacacagcagttctgaggcagctggaaagatatccagatgcttagattgtcaggccaggcttgagatatacaaactattgagccttatctgtgaccttgcttaggtgaaggcatcagagcccctgcaccaacatgcataggcctctgcatgtgtgcggggctgggtgttgaggtctgagcacaagtgtagctggagaggtgagcttgatgtggcgacgggtatgagcaggttttcttcagacttctgtgagtttacctagttccaggatttaaaggcacagagactttagaattaaaatagaatcattttctttttctaaatagcaacactaggaataaaaaataataattccacattcttgacaggtaatgttttttcttgtcttctaatccttatttattccatactcatttttatacataattgaaatgtattatgcattggatttttcttttgcattatattatagacgatttttcatgtaactccttactgttccattttatatgttttgtctggtttaagactttatctgcaaaccgggaaactgtctctacaaaaagaaaaacaaaaatagttggccgcagtggcatgcgtctgtggtcccagctactcggggctgaggtgggaggattgcttgagccttgggaggttgaggctgcaaagagccatgatcatgccattgcactccagcatgggtgacagactttatactgtctgttttgggtgatttgataatgatatgccctgatgtagtttttttatatcttgtgtttcttgtgcctgggtttattgaggttgggtctgtggcttcatagtatttttaaagtttggaaaattttaggccattctttctttctttctttcttttttttttttttgagacagtgtctcgctctgtcgcctgcgttggagtgcagtgacactatcttggctcactgcaagctctgcctcctgggttcacgccattctcctgcctcagcctcctgagtagctgggactacaggcgcctgccaccacgcctggctaattttttgtatttttagtagagacgaggtttcactgtgttagccaggatggtctcaatctcctgacctcgtgatctgcccgcctgggcctcccaaagtgctgggattacaggcgtgagccactgcacccagctaggccattatttcttcaaagattttttttctgccctgcctccctccttttttccctctcttaaaggggctgtgatttcctgaatgattgcttagtgttgtcccatagcttactgatgctcttttcagtgtttgattgttttatgtgttttctgttttgtatagtttctattattgtgttttcaagttctctgatcttttcttctacagtgtctactctgttgttaatctgttaatctgttgttaatcctgtccagcgtatttttttttttgtttttgaaacagtctcactctgttgcccaggctggagtttagtggtgcgatatcagctcactgcaacctccacctcccaggctcaagcaattcttctgcctcagcctcccgagtagctgggactataggcacgtgccaccacacctggctaatttgtgtatttttattagagatggggtttcaccatgttggccaaactggccttgaactcctgacctcaggtgattcatccgcctcggtctcccaaagtgttgggattataggcatgagccaccgtgtctggcccctgttcagtgtatatcactaattttgtttttatctctagaagtttgatttaggtcttttaaaaatgtctccctgtgtttctgtttagctttgtgaacacaattgtaataactgttttaatatccttctctgctagttctaagatcttctaataacttcccagttcttggtgtttctcattggttgattgatactcctcgttttgggttgtattttcctgcctctttgtatggctgccaattttttattggatgcccaaccttgtgaattttactttgttggatgctatatatttttgtgttcccatagatcttcttgagctttgttctgaggttagttgagttacatatagatggtttactcttttgggtcttgctttataatttgtcagatgggttggagcagtgcttagtttaggactaattttttttttggactaattattcctctttaggaataattaggtaccatgcttaggaggcaagaccatcctgagtactctacctaatgaaccagaaagtttgggttttccagtccgcctgctgagaacagtgactttctagccctgtgtgagcgctgagctctgctccttctaatcctttccaatgcttctttccctggcctcagggagttttctcacacacatatctctgctgagtactcgagagggaccttccccagatctccagagctctctctgtcttgttttctcttctctggtgctctgtcttatgaactgtggctgtcttggtctccttagattctcagcacctcttcaattcagagggttgcctgtccctcctccttgtgccacagcctaggaactctctcaaagcagcgagttggggcagccatagggctgacttagtctctcgtctcccagggatcactgtccttcattgctcatgtccagtgtcttgaggactctgggttttgtctgttttgttttttggtttgctttggttgtctcaggcaggagggtaaacccagtccctcaccctcattgtgctcagtagtggaagtctcactctattacattagatattagtatttgtagcagagccctggttccctggtacttggggagctcttgaaaggccagaaacagcatgctttctcaccttttccagggcttcagtttctggtgcacatcaagcattccatacacatttgttaaagtcctttgttagacaagtagtgattcacaggttctatttgtaattttttcagttaacatgtattgggtatctgctgggagctagtaaaaacaaaaagtggtgtgtgacaaattcaattctgacaagaacaaccttaaacacttagaatatactttgagcatatcagaattttaaaaatgtgtggcccttgagtatttgaaaccaacaagaatctattgcttattagtagaggatattttgttaaacaagtggagagagaggcattttcagtctaattggtgttggcttttagcagctgatggaaaccagttcgtgattagccaggcagtggtgaaacaggctgtgcattctgaatgcctaggtatctaggcattcagaatggtggcgctctttgagttagcatcttcttctttcttgattcttttttttttttttttgagatggactttcgctcttgttgcccaggtaacaactccagtgcaatggcgccatctcggctcactgtaacctctgcctccctggttcaagcgattctcctgcctcagcctctcaagtagctgggattacaggtgtgcgccaccacgcctggctaattttgtatttttggtagagatggggtttcactatattggtcaggctggtcttgaactcctgacctcaagtgatgcacctgcctcgatctcccaaaatgctgggattacaggcgtgagccaccactcccagccccttcttgattcttgaaaaggacattgggtgctgtacatctcgttatagatgttgataaaaatgcttgtgagaagagtaacattaaggtagttatttggtcatttttgcagattattttaagacaattctaggactgatttgtggtaaatcacacattgctgtatcatagttgtgttcactgaacatattcaggggctctacagatgcagggctcttagctgctttgcacacttctgaattcctgccctgcgaacaggactggatacctaatagacaacaggtacttgataacagtttattgaattaatgagtgaatgaacagatacataaatgcatgaaagaatggttgtaatgtatataacttggatttcaagactttttactgactgttcaaaataagaaattgaaaactttcctctgattttcctctactatttacacaatttaaatggaagttatcttgtaccttcaatttctgtctaggattcgtacaataacgggtcatctctgagtcgcttaatgtctcacttgtctttctacagtgtgttgaagagatcctaggatacctgaaatcctgctttagtcgagaaccaatgatggcaactgtttgtgttcaacaagtaagagcttcattcttttcctcttctgttaagacgttcgggtatgacagcaaaacgctgctactccttaagaggcaggcgctgttggcataatcagctgggaggattgtggggtccagcgcagcactttttggctcagtccatgattgagccaagaggccatccttcccttcactccccaggaggacgaggtctgtcactgtggagggcagaggacaccagaagctcctctgcaacctcgctagttaacttccagtccctcggagtttctgtttagaatgctcaatctcatttagaattgcaaggaaacccaaaacgcctatttaaggtacaaacagcacttcatacaatatctcatgaggtattaatagtgattcacaggaagaatttcacgctgtgagtctttgctaacatatccagttatttacagatggatttgatatttgtgtgggagattcttaaaagtgttgttcacgccacattgttgatgcctcatttttttcactgtagttgttgaagactctctttggcacaaacttggcctcccagtttgatggcttatcttccaaccccagcaagtcacaaggccgagcacagcgccttggctcctccagtgtgaggccaggcttgtaccactactgcttcatggccccgtacacccacttcacccaggccctcgctgacgccagcctgaggaacatggtgcaggcggagcaggagaacgacacctcggggtaacagttgtggcaagaatgctgtcgttggtggaagcacgaaagagcaagcaggaaatactttgtaaaagaataaaaacgaaaaatgttagcgaacatcttctaatagtctgctgtattcagagaactctaggagatatatatggttgatgcaaagatgatttaaggcatagcccggccttccaagaagtgtgtggccagtgagtgagatgggcttgggacttacacatctcagaggtgggggtagaggaggaggaacactgagtgggctgagaagcagccagctctcattgccaaagtgtgtcagcaaaccagaatgcagttcataatgtccccacccattcaaagcacaggacctgtagagtggtgtggcatgtgttggtggcacttttcaggcctgtaacaaggatgaaagaacagcttcatagcagcacagtagtgctggtgttcagaggtgtgtgaaggccatagaagcatcttggatatattaccttgtgttttgtcagctttatgactagaagtctcttttcacttaaatttgttttttttttttttgagacggagtcttgctctgtcgcccaggctggagtgcagtggtgcaatctcagctcactgcaagctctgcatcctgggttcatgccattctcctgcctcagcctcccgagtagctgggactacaggcgcctgccatcacgcctggctaacttttttttgtatttttagtagagacggggtttcaccatgttagccaggatggtctcgatctcctgacctcgtgatctgcccgtcccggcctcccaaagtgctgggattacaggcgtgagccaccgcgcccggcctcttttcacttaaatttatgtttgtgtttttaatgcctagtatacaggacttcttaaattgccttaagtatgaacaggtatttgagttgctaatctgtatagtagcaataatagaatcccttgtttttccttttataaatttagcgattaaatagctacaattaaaacactagagtcaggagtcaaggaaaatacccatgttccaggctgtatgttagtgatgtacttactatatattggagtttcaggagtaagtctgtttcaatgctttctgtaaccatttggggtattaataagcatgtgagtgtgtgcatgtttgggttaatttcatatatgtttcttagaagggatatcattgatgtaaatattttaaaggcttgtcctccaaaaaaatcatgtaatttcttctaaattactgatcttttaaatgaccttcacctttctctcaaatctcacttaagactgggctgagtagtcagtttcctgtagcagaaaaaagctcagacttgagtagccttctgcgagtgaggagacttgatggctgtcaggcagctgtaaactctaaatagagtgtcattatctgaagagggcgatgctgccacactgagtggcctttcaagttgtttctcaatctgacacgttctgatcgtgtgaatgtgaaattggtttgagcaggagtatatctgagtgcagaggagattatttaaagatattctcattctctgcttcccttttattcccatttggcagatggtttgatgtcctccagaaagtgtctacccagttgaagacaaacctcacgagtgtcacaaagaaccgtgcagataaggtaaatggtgccgtttgtggcatgtgaactcaggcgtgtcagtgctagagaggaaactggagctgagactttccaggtattttgcttgaagcttttagttgaaggcttacttatggattctttctttctttttttcttttttatagaatgctattcataatcacattcgtttgtttgaacctcttgttataaaagctttaaaacagtacacgactacaacatgtgtgcagttacagaagcaggttttagatttgctggcgcagctggttcagttacgggttaattactgtcttctggattcagatcaggtttgtcacttttatctttcatccatcatacctgttcctaatttagtacaaattaccctaaaagacactgaaatctactttaaagaaatgtggtctgcatgtttccctcatcagttgctgctgcttatctttttcatgcacctagctggtgcagaaggcctggggcatagccagcctcagcaagtcagcatccttgccccagctccctggactcaaggctaacctggggttggctgttagggatttccaaaggtttgtcccatccacttgcctcccctccaaaataagtttgaatttaaattgtgagatacaattaagatttattgtttggggaacatttttgcaaaatctagagttagtttaaacagattatcaattattaccataattgatcatctgcagtttcaagctatctaacaggttcacttacctctttaaaaaggaatggaatttagcaggacagtaactgagacccgtgctcctggagtccatgtgggagctgtgtggctctgcacaagcatttgcacgcttcccctcttgactgcattaccttcctcctatagttgctgtgggcaccagattctggctagtcctgtcccttcatgatgcacattttcctcaagattcgtcccagttaaatcactgcagatgaaactgccttttcatcgtcaaaatttaactgtcatttttgagccgtgatcttgggctactttcttatgtggggtaggaatatttgtgagttagaaatattacacttctctatttccttctagacgtaaatctgttaatcctgtcagcactgttactcacctgaaagggtctgtttccctaggagaactgagggcactcggtcaacactgattttccacagtgggtattggggtggtatctgcttgttttttttgttgttgttgtttgtttttttttgttttttttttgagatggagtctcgctctgtcacccaggctggagtgcaggggtgcgatctcggctcactgccagctccgcctcagaggttcacgccattctcctgcctcagcctcccgagtagctgggactacaggcacccaccactacgccaggctaattttttgtatttttagtagagacgaggtttcactgtgttagccaggatggtctccatctcctgacctcgtgatctgcccgcctcggcctcccaaagtgctgggatgacaggcgtgagccaccgcgcccggcctggggtctgcttttaatgaaggaggcatcaaggggtgggctttgcgttggcctgatgctttcatctttctttcacaaaacctgtccgaagaaaatccgtctaaatgggccattgctctcctcaggaaatagtcattgggaacttcttttcctttcctttgacactaggaggctgactggggagaagccctggtctatggctgtgggcagcaggggctgagaggagcaggctctcaggggggcacgggtaccccaagggaagccagagccctgatttgttccattctagtaagaacaaagactgctctggtttcatgtttgttctgattgcctttcatcaaccggtcccctttctcccagttcttaagattcagtacagtgacagttttatgaacaagaatagaacactagaacagacaaaccattgaactctatgctgataaagatttattgagctcctgctgtatgtttgcattctgcccagaggctctgagaaaaccaggccatatgctccatgctttatccatggaagctccccgtcaggttgggaaagctgacagctgcagggaatacagtgtgacacaaaactggctcccatgcagcccttacgtgtcgcctctcagatggttgggggacgaaggtcgactcctttgggtatcttattactaaaccagtttcagggaatctgtgccaccctatctgccattaacgtgaacagatgagtccccaaggtgtaattttgggtattgtctgatgtctcttggaatttattatttgtttttccaatgagatttcacctcagggtatagtaaagttgttgaggggattcctggatgtgttctgcaattatctaggctgatttcagaatagagttatgcttatagtcaaatttatcagctgtcaagaattttatttaaaatttatgcagataagcaggaggaaaagaagcctggtttttacattttaatcctattattgatgtgaaattttattttccttcctgtaggtgtttattggctttgtattgaaacagtttgaatacattgaagtgggccagttcaggtaatagcattttattattttagatttttttcttcttcttgtgtacttacatgtaatttaggttattaagtgaatgtttaaactactgttaggcatttttgctgttttctttaaatggaaatctgactaacatactgtgcatttttgcttctcttaaaaattaatgtatatctcaagacttgtttggaagtagttatgtatctgaaaattccatatgttgtcagtattcattgcacatttcaaagcatttaattgtgttgacagatggtggaatgaaatcttgtggtggagcactagtttttaaatcttcttagagaaagcagttttatataatgttgtctttagtaattattatgcatttgtattctctgcagctttttcttgctagatgttgaggttttaatacttcttgctagtccattacaggtttataattattaaaagttaaaattcttttagtacctaaaatgcttaataaacattgtaattaggaaaatttagtgcagaaggaaagtgttcccagattccctggggtctggaaacatagtgtttattctaattacatgacacctccactgtgttttggggcaagttactgtttctcttttgagtttcaatttcttcaagagcaaagaggcagaggagagctaggaagatcgtagctgctgtgcccctgtgccgtcgggtgccttctacctgctgcctccgaacctttacacatgtccctgctctgcgcgagggcacagatgggatgcactgtggcaggggtggggttagagtagatcacggacacctgttagcttgatgtgtgcttgctgtcaaggttgaatcatgaattattttatgttgcttatattgatatgtatcttaattttaaaagaaaggtctaaatggatgtttttgtttttagggaatcagaggcaatcattccaaacatctttttcttcttggtattactatcttatgaacgctatcattcaaaacagatcattggaattcctaaaatcattcagctctgtgatggcatcatggccagtggaaggaaggctgtgacacatggtaacgggacacacctttcactgtcgtcttcggtgtcgtgatgtgcttggcagtgttcgttttcatatacccactttgaacgttgtcagtggcagccatgtgcttctcaggctctgcatgtgtgtctgtgtatgtgaaggtactggttagagacgtttcaaaagagaagagagcatattctttactctcagcaatttgtaatcttctcagggaaaaaaattcaagaaacagtaagataacctaaggtacagatagattctgaatataaagttcctgttcattcacatgaaacgctaaaagttcttcacttgatcttagccaaaaggccaagaagcgatgcaacactaaaaattcttaaatcgaacttgccgtgaattaaattttgatctctcatccagtggtattggagatatagtttgacttgggttcagggctttctgttttgcctgatgattttgctggagcttaaataaggaacccaggagatggccagctgtgcaagcccccagcctgtggaaggagctagtgtggttttatgaatgagttgcaaatctttctttgagctttttgaactgatcttccagcattgccctattgacccctccctgactcctttgctggaatctgtaggcttttgaactttgacagggacacatcctaagacccttgcaaactcccagatgtgagaatggcactactacttagagtcttttcgactcagcgtgtgtgcagaagagcatcaaccgggctgtgttgcgaggcagggccttggctgacctctcagtgtttacatagctaagccagttagtgtttgccacggcctcacaagggcttcagattcacacagccaaagtatagattattaaaggcataggtgtttggtttcctggacttggagggtctttggacagaaaatcagtaggcaaccacacccagtactttgtgctgggaagcttggtcatctgtgagagggtcagagagtatacccatgcgtgcatgccaccgaagggtcagtgagtattcctgtgtgtgcatgtctcagggccggagagagtatgtgtcactgagaggtcagagtgtttgtgtgtgtgtcaaagagggttgcattgtgcccttcactgaggggtcagagggtgcctcgcgtgtgtgtgtgtgtacgtgtgtgtgtgtcactgaggggtcagagtgtgcctgtgtgtgtgcttgtgtgtgcgtacatgtcactgaggggtcagagtgtgcctctgtgtgtgtgctcatgtgtgtgcatacgtgtcactgaggggtcagagtgtgcctctgtgtgtgctcatttgtgagcgtatgtgtcactgagggggtcagagtgtgcctctgtgtgtgtgctcatgtgtgagcgtatgtgtcactgagggggtcagagtgtgcctctgtgtgtgtgctcatgtgtgagcgtatgtgtcactgaggggtcagtgttcctatgtgctcatgacattgagggtcagagtgtgcctgtgtgccaatgaaaggcatttcttatatttttttatatgtggtcatagtagaccagttaatttattttgactcctgtgttagaccaaaataagacttgggggaaagtcccttatctatctaatgacagagtgagtttacttaaaaaagcataataatccagtggctttgactaaatgtattatgtggaagtctttattgtcttttcagatgaatcaagtagattattcttgagaccaggaatgttgctgttttggttatttggaaagttttatcattttcaaattgacttttgaatttgagtcaccttttttcagaagtggtgttaaattataggagccctaggttttttttctttttttagaagtcatcacaaaatgatcagtgttcagaggaagagctttgaccttccacatggtataatgattgataaccttaattcatctcttaccataaaccaagtatgtgtaagggttttctttatttcttgaaagcattttgtagatgttgagagcagttttccaaatgtaatttccatgaaatgcctgataagggtacccttttgtccccacagccataccggctctgcagcccatagtccacgacctctttgtattaagaggaacaaataaagctgatgcaggaaaagagcttgaaacccaaaaagaggtggtggtgtcaatgttactgagactcatccagtaccatcaggtaagaggaatgtatgttggaactgtcgtggatactttattgacccgtgcagatggaaggaagtgccatgtggtaacgctcactgttaactgtgttactttgaaccaggtttgggctttctggggcctgggtagatgccggtgcagggggatggggagggaggcggggggtgggggggtgtggtggagttggggaggtgcagtggcaggaggtgttgttggtgtgtatcctttttttttttttgagatggagtctctctccgtcgcccaggctggagtgtggtggcacgatcttggctcattgcaagctccacctcccgggtttaagcaattctcctgcctccacctcccgagtagctgggattacaggcatgcaccaccatgcccagcaaatttttttttttgtatttttagtagagatggggtttcaccatgatggccaagctgtttcgaactcctgacctcaagtgatcctcctgccttggcctcccaaagtgctaggattacaggcgtgagccaccatgcccagcctggtgtttatctttaaagtgggcacagccacaggagttcacctgactcctggtctgagagtcacgagatcgttcaagatagtgaggccctcttttccaaaacgaggaccaaaaatcaattgacagtgttggtcaagatggtagaaaccttaaaatgatagaaatctcaactctgaaataaaaactttatttgtatatttatttaccactattttgacatagggctaaggtctttttctttgagctgatttctggttttgttttcttaaagtggcataagaattcaaagacattttgaggaaggctgagtgcagaaatctctctttttaaatgacttctcctttcttttaacttgcactgttgtctagccctcacttattttgtcaattctttttagctgtttgtctttgaatcttcataaagccatagcttttctcataagaagcagcactttctttgttcattcatattttaatgaacccctgtagtatttaattaaatacttaatgcctaattaaatcacataattgcaatgcaaaagtacatgtatcataaagaggtctgaaaatgagcaactggcaagcaggtggtggcaggcagagctgcttgggtgggtgggtgtcatggagaggagttcatcagccacatgttcagtgagctctggatatgtctgtttagaaatgatcactaataaacttgtgctcaaccatgtatacctctgggaagcaggtgctcttcagtagattgcctctgcagagaacacagaattgaagtgaatgtccacaaaggcaatgagccacctgcagaatagtttagtcaaggctgtgtttgaagtttgccaaagattaatatacatttgattttcatgttgtgccttttctctgattgtgaaatattacaaattctatacaaataacaatgatggcaaatcctcctgagcaaagtgtgcaccttgtatgtgccctagaggaacttgtgtttcgttctgattcccctacatttctcatgtcatagagtgggggttgcattagtgtccccctgtcctcgctgggatcacatctgtttggatcctagagtcttccagctgaactgggacaagtataacagacggacacgtaggggtggaaaggcgtctcttggcagcagactttctaattgtgcacgctcttataggtgttggagatgttcattcttgtcctgcagcagtgccacaaggagaatgaagacaagtggaagcgactgtctcgacagatagctgacatcatcctcccaatgttagccaaacagcaggtttgtccccgcagccttggcttgttgttgcatagtgatggtagcttaaggtccttgtgaaaggtgggtggctggaatcagctcttccttcagtcctaatctgtgccttgatagcagttctccgtgctagtcatgggacagctgacttcatttcttctcacaatgccatctcaggttggtattgcccacctactttacaggggggatcccacagctccgagaggttatggaggtgatcaggcagcacacagctttagagtgctggggtgagggcgggccaaggctaactctaaagcccgaacccttacctcctacactgcctcctgcattctggtcaacccagtgttttatttggtggttagatttttgtttttgttaccttactgcttgtaatttagcagttttcctttcctttcccttcctttcctttccgacagggtctcactctgtcacccaggctagagtgcagtcgtgtaatctcactgcaacaacctctgcctcccaggttcaaccaattctcccacctcagcctcctgagtagcaaggaccacaggtgtgcaccactacgcctggctagttttttgtatttttagtagagatgaggtctcgctgtgttgcccaggctggttttaaactcctgggcgcaagtgatccaccaaccttggcctgccaaagtgctggcattacaggtgtgagccacctcgcctggcctattcatcactaatcagaatttctatgatcaaatgacatgaatcattgtttccacaactgcagtggaaggaaatggcctggcagtgccagtttcagaagcagcctgcccccagtcaggcacaggccactgtgcccccagtgtagcagcacctctgtagctcacagagaagggtggtggggacctccttgaggcagctctgccagaaaatctcatgagctgcctggcacagcttgaggttgccttttaagtggactcagcaaatacatgtttgttcatcttgattatacacaataaacaactactctgtatagtacgagtagtccgtggtttttggcatttgatttaaacttagaggcatgtgatattgatgttactgccttcatgactgcacccccattctgatttcataatggaatgttatcttgagaccagttagacaacaggacagggatcttggcttctggtgagattgacagcagttttagtgtggtcagggtctccctgcctacagatggttttagaatggtgccctggaagctttatcccattcttttctgtgcgtaatctgagtagagtggagatcgaaggcctgaatacatagtaaatacctgacttaatatctgccgcaatggaaattgtgtgatacaacatttatgaaacgcttagtgcagcacctgccaggtagctcaccacaggtgcatgttgcattcagaagtagtgctagatactatcctgttactggcagtgcatacatcagtgatcaaagcagattaaagaaagaccccctgccttcttggagtgaagattttgttgggatgcgggtaaggggacagacaatagaaaagcaagtgagtgaagtctataccatggcggctgatcaggaacaccgtacagaagaatccaggagggaagagagttaggtggtgtctgcggtgggagtggcattgttcagctggtgatgagaagaagctttggtgatctggtgacatttgagtgaatttgcagaaaggaaagatacaagcctaggagatacctggggaaggaacattccaggcagagcaaatagcagtgcaaaggccctggcggggggcggacatgctgttagggtacaagcaatgagggtggaggagtggggcagccatggggagggaagggagtgaggcctggtggggtgaggccagtgtggaggagccttgagagggtttgcgctgatgtggtgtaggttttagcaggatcattcttattcctgagttgagaatagccttgagggggaggtgagggcagagcagggccacccatgtgagacccggcactggagtggaatggcccaagtcagcatcccttggcagcatgaaagcaaaaccagcaaggtttgctggtggcttagatgtggcatgtgagagagagcagggctttgggggtgatttcagggtgaggacagggtggctgtggacaaggtagggcagacattgggggcagcaggaggtcagagcctgtctggatgtagcagttgagaccccataggtgcctaatgaggtgaggccagcatcaggtgtatgagcctggagttgtcgagagactgtggggcagggggtcagcatctgagatgtccactcacagtggacccagactggctggagaggaggaggagcttgaataccgagcctgctgagtcccagctccaaggtcaggtaggtgaggggagccagtgctggggcagggggagtaggcaggtgtggggttcctaaagccaagattttttttaaggcattttgtgcaggagggcgacatctgctgtcagcaccttgggaacttggcccaggtttggcagcaccgagggcactgatgagtgcttttggaggagcaaagggagccaaaccctaatgggaatgtgttcctgaaaggacaggagagagacttgggaaaaggttttacttgaagagggaacggagaaatagggcagtagccagaggaggagaggagtcggcaatgggttaagttggcagaaatgaaggcctgtttacgcactgagggcagaagcaacagggaggatcagttcatgacacaggagacacaaatcgccgttgtggtgttcacagacatgggttaggattggctgcatggatgacagagcactgtgggttctcccagagttgctggggaggaggcagagttggtgagcacaggcgagggtccaggatgcaggaatcctggagctcaagtcagttgttcccttgttgtaagatgtggccagtgttgtgagcttcacatctgtgccttgaaaaacaccacatctgtttgcagagttgtttactatgtatacacactcagtagaaacaaaaattggaaacagtcagtgcccaccatcaataagtaatggttgaacacactgtggtataagcttagactattttagcttgggctattttgcatgattaaaaatgttctggccaggtgtggtggctcatgcctgtaatcccagcactttgggaggccaaggcaggcagattgcttgagctcaggagtttgagaccagcctgggcaacatggtgaaaccctgtctctactagaaatacaaaaagtagctgggtgtggtggtgtgcgcctgtagtcctggctaactcaggaggctgaggtgggaggatcacttgagcccattcgtgcgccactgcactcctggggcacagagtgagactctgttagaaagagagagagagaaagaagagagagggagggaggaaggaaggaaggaaataaatggaagaaatggaagggaggaaggggagggaggaaggaagaaaggaagttcagccagttgccttgggagttctccattgcactgggttaagtgagaagagcagagacgtttatgatttttcaaaacaactaaaacaaaacctctgtgggtgagggggcaaggatatggctataggaacatggggcagattaagaaagggatatacacacaccacttagcatttgttacaactgttgtgggagggatggagtgcagaaaaagaaaaaaaaaagtgcacaccatcccatgtatgtgtatacaaagggacgcttggaagactggtccccaaaatgttggtaatgattgtgtcagggtgctgcagtgctagttgattttttttcacacttttgtatatttgagtcttttacagaaagcatttattatttatgtaataaaaatctaaatgacaagatttctgttatgggaaaaatgtagctatacagtgttgttgtaaaaatgtttgcttggttcaccactgaacttaaaatgcttttaaatgagggaaggtgacgatgagatgattatgatgatttgcccttgagttacatagctggtgtacaggaagctgtcgtttcttttggcttacgtagaaatgtttgtggtgtctaattccacagatgcacattgactctcatgaagcccttggagtgttaaatacattatttgagattttggccccttcctccctccgtccggtagacatgcttttacggagtatgttcgtcactccaaacacaatggtgagtctctcgcctggctcagcagatgaatctggacggcttgttcaggctctgattactgggaccacccccagaatgtctgagtcagtcagtttgggtagggcttcttgagagtttgcttttttttttttttttttttttggtgtgggggtggtgcggaacagagtctcactctgtcgcccaggctggagtacagtgtcatgatctcggctcactgcaagctctgccttccagcttcacaccattctcctgcctcagcctcccgagttgctgggactacaagcgcccaccaccacgcccggctaatttttttgtatttttagtagagatggggtttcaccgtgttagccaggatggtcttgatctcctgacctcgtgacccgcccatctcagcctcccaaagtgctgggattacaggcgtgagccaccgcacccggcctttttattttttttggagatggagccttgctctgtcacccaggctggagtacagtggcgctacctcgactcactgcaacctccgcctcccgggttcaagcaattttcctgcctcagcctcccgagtagctgggactacaggtgcgtgccactgtgcccggctaattttttgtatttttagtagagacggggtttcactgtgttagccaggatggtcgcgatctcctgaccttgtgatccgcccgcctcggcctcccaaagtgttgggattacaggtggctctcgcaccaagccaagagtttgcatttttagcaaattcccaggtgaaactaatgcctgcttttctgggagcacactttgggactcagtgatagagaggtttattggtaggatagtaaaataggagttattttctttcacaaaattggcaattgggggaaatttaatcttccttttttcttcagctgtgacttatgtattatgtttattttaggcgtccgtgagcactgttcaactgtggatatcgggaattctggccattttgagggttctgatttcccagtcaactgaagatattgttctttctcgtattcaggagctctccttctctccgtatttaatctcctgtacagtaattaataggttaagagatggggacagtacttcaacgctagaagaacacagtgaagggaaacaaataaagaatttgccagaagaaacattttcaaggtatgctttctatctgagcctataactaacccatgccttttgggaagtcacgtgatgtttcacagtcagtaagtctggaataatacctggtcttgcttcacttctgagttgggtaaagaagtctgtatcagtgtaattttctaatccgtcctgcattatctatggctcttggttcatacctgtcttgaagttctgtcatgttctgtctcttgtcctcagtagagatgctacagcagtggctcgcctcaggcagggcagggcagtggggtggctgtcctgggggcaggcagtaggggcacgctgacgtcagggaagttgaaacccaagagaagccagtaaaagtgagtctcagattgtcaccatgtgctggcagttttacacgctgtcagtaataaaagtcttctccctgcagggcagcctgcctccaataaatacgtgtagtatcaaatcctgtcttccctcataaattgtttggaagctccccaaggacagtgatgaggcactcgtaagtgcttgctgcctagatgggtccctctccacctttgctagattctgagcattcactgagttagagctgcttctgcaaatgtgctgcttctgctaagtggctgtgacttcatgcagccttcacttggtttgtcatcagtggagatgccctgtgttgtcgaaggagataagcccagtaagcctgctgggcaccttttggtttgcaggttcagcaggcagcccatggctttccctgtgtcgcattgaagcagctggctaaaattgatgatacattaaattcctgtgacagatgatcagcttgtatttgtgtaatggtgtacagttcacaaagcttaaaaaaatgctacctgccatttcatcctcagtgaggaaggtgatacacagagagaccaagtgactgtgtccacggcgacggcgctctgcatttcactttagcggttaatgtactctacctatatttttactttatatttaccatatatcttttcatgtatacttggcgtaagtgctttatagtagtcacctaattcactgtcatcttttttgtttcttggaaggtttctattacaactggttggtattcttttagaagacattgttacaaaacagctgaaggtggaaatgagtgagcagcaacatactttctattgccaggaactaggcacactgctaatgtgtctgatccacatcttcaagtctggtaggtgaatcacattagtcttcctggagtgtctcgttccccattctgcactatacactctcagagtgtaggagctgtgctgcccggtagaaactctgccttgcccagtgtgccagttgaaaatatttgttgctgtaagagtacacctgataccatgtgacccagcagttccactcttgggtatatacccaaaagaatggaaagcagggtggtgaaaagatatttgcatgccagcattcatagcagcattattcacgatagctaaaatgtggaaccaactgaagtgtccctcgatggatgaatggataagcaaaatctggtgtatatttacagtggaatattattcagccttaaaaaaaggacattctgacacatgctacaacatgggtgacccttaaggacattatgctaaatgaaataagccagtcacaaaaggacaaatactatgtgattccacttacatgagggacctggagtagttaattcatagatatagaaagtagaatggtggttgccaggggctgcaggggaggggagttatttttacaagatgaagagagttattctagaaatgaatggtggtgatggttgtataacattatgaatgtacttaatgctactgaactgtacagttaaaaatagttaagaggaccaggtgtcatggctcatgcctgaaatccaagcactttgagaggccaaggcaggaggattgcttgagccaaggagtttgagaccagcctcagcaacatggtaggaccccatctgtacaaacaaactagccggggatagtggtgtgcatgtggtcccagctactcaggagactgaggctggaggatcgcttgagcccaggaggttaagtctctagtgagatgtgttcatgccactgcactccagcctcggctatagagtaagaccctgcctcaaaaaaacaaaacaaaacaagacaagagccaaaaatggttaagatgggccaatcacagtggcttatgcctgtaatcccaacactttgggaggtcaaggtaaaaggatcacttgaagccaggagcttgggaccagcctgagcaacatatcgagacccctatctctacaaagaaaatcaaaaactagctagatatggtgggcacatgcctgtagtcccagctacttgggaggctgaggtgggaggatctcttgagctcaggagttcgaggctgcagggagctattattgcactccagcctgggctacagaatgataccctgcctcttattaaaaaaaaatccaaaaaaaaaaaaaagtaaacctgagagcttcctcctcctgtgttaaatttggaggccaagatgtttttgttacttttacaaatgatcaaggacggtgaaggttgggcatggtagctcacacctgaaatcccagcactttgggaggctgaggcggggtgatcgcttgagcttgagaccagcctggacaacatagcaagagaccccatctccacaaaaataaaaaaataaaaaaaaatagccaggagtagtggcatgagcctgagcccaggaggtcaagctgtagtgagccatgatcatgccactgcactccagcctgggcgagatcgagaccatgtctctagagaaagaaaatgacaaggacagtgaacccaagaaagtcataagatgccagctgtgcagcaagcatggaaagcagccagtccaaattaggacagtgtgttttccaagaagaacgatcgtttgtaatgagaatgctttgctttaaataaatgactaaatagctagaagcctagttctaggggataggcacgtctttcttctctcaagaaaatagaaaggcaattctaatttctagtaacagcaaacagcattaagtcatggtccaaatatgaggcaaaccaaaatgtggcttgattgttcagcagttgatctgttggaagcccttgatattaaaaaggttctcctttaagcggcttaggagtcacgatcaaagacctatagaaagagatgccatccttctaggatccttggctctcttgggaactagattcagatagtcataatgtaaatactgcttgagctttctttctttctttctttctttctttttttttttgagacagagtttcactcttgttgcccatcctggagtgcaatggtgccatctcggctcaccgcaacctctgcctcccaggttcaagcaattctcctgcctcagcctcccgagtagctgggattacgggcatgcaccaccacgcctggctaattttttgtatttttagtagagacagggtttctccatgttgaggctggtctcgaactcctgacctcaggtgatccacccgcctcggcctcccaaagtgctgggattacaggtgtgagccaccgcacccggcccgagctttcatttttgaaatcaatgtatgactgaaacactgaagacttactgacttaattatggtttcagaacagaatgaaaatgtcttcggttctgatgaatataaaaggaaaactaaccaagttaatttggcaagtagatggtagagatagaggtggggagtggaaggggaactaaaatcttcacctagcattgttgggattatatggttacatcatctgaagttgacagaccaaaatatagaggcttcagaggtctccaaatagaactaaacatgtaattcagattgttaggaggtagtataaatgagctaaatctcatctttattacggtagagttaatgggtgatgtctaaagttgtctgaagtctataaatcatgacaaattatgatgtggtgattgtattcaacagtctttcagttgcagggataaaaccccagtttaaactagagtaagagaaagaatgtgttggtttaagctcctggaaagtgcaggcaagggtagttggtaggactgcatctagtgttgtaattctgtggtctgcattgtatatttatgcatctcagctctgctttcttcttttcatttatataatttttaaattttattttaaagatagggtctcactttgtcgcctaggctgaagtgcagtggcatgaagtgcagtgcgaggctcactctagcctcgaactcctgggctctagagttcttcctgcctcagccttctaagtagctgagacaataggcatgtaccaacatgcctggataggttttaaaatttttttgtagaaatggaagtcttgctgtgttgcccaggcgggtctttaactcttagcttcaggcgatcctcctgcctctgcctcccaaaatgctgaggttataggtgtcacccaccacgcccagtctcatctctgcttcctgtgttagttttgttctctggtgggctgttttcacatgaccgaagatgacctctagcaggctgtgttctcagcccctcaagtaggcctatgtgattggccttgcatgagtaatatgggtgaccataaacccctgaatgctctggtccacatgggccaaatgggagactggacagcattccattgatgaggaggtggggctggtctccgggagtaagggagaggagcacatgcagtaactgatggtctgctgcaagggatagcagcacagcagttagaattttggaggtaactaccagaactgaaaacagaaatgataacaagtagttgccttaaaaagggatgggagcagggtgcttttgtgatcaaagctcctttctcttactggatttttgtacacattttgcatacatatcttagagtaaaagatagcattttcagccttggtccatttgaggatactcttggcgtggcccgcctccatgctagcaggctctggttgtgccaagttcagttgagcatcctggctcttgcctgcacggaacttccagtcagtgcgtcagtatcacaagtcttgatatttcctatgaagaagaacagtagtgcagtgacagacgaaatgggtgggcaggcagaggcaggatttctgagggagagaagtagctagctttttgcagagaagagttccggcacccaagagagcagctgagagtacaggcaggcaggcaggatgccggtagggcccggccgcacggcgccacagaatcctggagaaaggggcctcttcatggcctctgcattcagctgctgtcaccctccgcacaggccatggccaaaatttaattttcatagtggactctagtttttgagccttacttgctattattgaaataattttcttgtttctttttaaagatcttcggattatgcttcactgaccactgtaataagtttaaagttgagaaaatatggcttgttaatgaatgataggtcaattttagtatgttggtcattttaatattttgccaccagttggtttggatttgatgccaggaggagacagcctcatttctaaggactagtcttgcctttgtgggataagggtggtgtgttctgtgtccttctacatgtccgagcgatctctgtgcagctcaaatgtggtcactgtcttattgcgctgatttcctctccttccatctcacaattgaggcaaaatattgttactgttgaagtgttgtccaataggacttccagcagagacaggatgtctgcactgtctaatttagttgcctttagccacatgtggtgttctgtacctgaaatgtggctggtctgattggatagcttaatttataattttatttaattttaattaacttaaatttaaacagctctgtgtggatagtggctcctgtatgagacagtgcaggtctgttgagaagcagctttactggtgggagtggagggcttggagagggcacgtgggtttcctgctggtatcttttgaccttatttaatctgcccaacatttgcaagtaagttgtgtgtgtgtgtatatataaatgtgtgtttctgtcttcttgtttcctttgactgcatttatttgaaagacactaggtggcagaattactgtatttgattggtttcaagataagagttgaaataattcatctcgtgtttttatataagtaaggtgtgtttagcatgtaaaattggtaatatgtattcacgtactgcttaaacaaaggctatgaattccacccataaaccgaaaatgaagacctttaaatttgtccatttcaggcgtgggtacttcttaaataatacctggttcaggaactagtcagaatggcacccttgactttttgtttcctgcttttcctcttgttgggagaggagggtattcatcccaaagtggtttgcctatttcacattccatctaggataagcagaatagccaagaaagatagctgtcctcctgtttacaacatttggggtaaccagcatccctctcttttggtccaagatagactggtttagaaacagatgatggcaccagaggcccaggaggtggaaacatcagctttgtttgttgtccatgtggctgaattagagctgtctggccttgtagcctcaacacggccttccagctttgctcaccgtgattttcaaggacacatcttgtgctcttccctgcctgccatccagactatacccagtcagggtggcaggagctgctgccccttcctccctgagtcctggtcgtgggtggtggagatgtgccatgacgctcacggaggcatgctcaccccttcctctgtggcagaggggatggctgcacgacagctcttccctgtcctttccaaagcgtctgtggttccactttttggggcaaagcaggaatactggaagagagagaaagtggtcctttctatagtaataaagttgacattgattcaagttcatgcttggggaaaggacagggctactaacaattataatgctgggagcaatggaattttctcatgggtatgtggtaggtttaattttaattatcccagttaattcttagaactgctctgtgaagtatttcccgctttgtgcttaagttctaaaagatcctgtgccaaaaccaagaatgaaaacccaagcattctttcttgcccatcgatctttctctcatcaggccacttcttgggttgatagtggtgagtgtagccgctgccactttcagaatacccaccatgggccccagtcactgtgtggcgtggagaagagatggttctctctgtgtcatagctgaacaagcccagcccagagaggtttctgccctaggagctctcgatggtggaattgggatgcgatcccacatcctgcctgttttgaaaacagcattctttatttccaattcctgcttccattgttccttttaatatttctttgtttagctcacaaaaacacggcttgcggagctgctgcgtgcagctgtagctgtttctctgggtgcagcctgcatccgccttcctgcccgcctcctttcctgcactgccatcgtggtctccgggcacttggtccctttctcttcccctgagtccctttggctcccctgtgccacccttgtgatccacaggctctgccttctttctgtctcagactgctgctcatcactactcgggaccctaggaagggaggttccaccgagaagcatcttctcatctcagccacgttctcagtgccactgttgtctttgttaggtaatggtagctactgtaacaaataaaccaacatttccatggcttcacaccagagaaggttgtttcttggttttatgacaatgtattgagggtgttcttggttcacggatggttttcctccatgtgggaattcggggacccaggctcctttccttcttttggttctgttctccaggccttcacatcctctgtgtctggttggggacaaggagagggaaggtaaagaaggctttgtggccttggataagtgacaggcatgcctttgctggtgttctctcgtggtgacaggtcacagccccaccctgtaaaaggggactgagagacgtcgtcctgctgcttcccagcagcagcactgtggtctctgatgtgttttctgtgaggataaaaacaggtgattccaggatgaggaaagtcagggaaacccttggaaggaggggaccaggcgggtgtcaccatgggattagtggtggcttcagaatgagctgcagcgagtgccatgccttctaaagcttttgctattctgatatgcccacaccatgcccagcaggtgtctgccttgctctccgcagagagagtgatgaatccttctcatgagcctctgtccagttgttcctccctccacctggaagggaccctgggttcctcataacatcccagcggaacaggggaccttctatcctgtccccaagttcatcctcatcctcctgccggcttcctggcccctcttatgtctgcttcctgacgccacatccttctggattctctggaattgaattttgcctttgatgcttatttaaaaatatccattgcaggccaggtgtggtggctcacacctgtaatcctgtgcactttgggaagccaaggtgggcagattgcttgagcccaggagtttgagattagcctgagcaacatgttgaaatcctgtttctatagaaaatacaaaaattagctgggcatggtggcgcacacctatactcccagctactcaggaacctgagacaggaggatcaattgagccccggaggccaaagctacagtgggctgtgatcgtgccactgtactccagtctggtcaaacagagtgagaccctgtctgaaaaaaaaaaaaaaatccattgcatacttcaccgtagcgaaacatgtatgtcttacctttcctttcctgcctgtagctgctcttttacacttaacagccacactaagccagccttaaatgaaaaacaaaccagcacttcctgtgccctcctgcttccttcatgaggggtccctccctctgtgtacactccattctcattgcccatggtggtttgtttccctcttgtttctcaagccatggcagcctgcctcttgccctctttactaaaaaggcctttgcagaggctgcctgtgttctttctttctaggtctctctcatcctaggccctccagcttgattctgtggagctgccctcttgtcactcagtagcttgtggggtcttctctgtctagccacttaattgattgtgttcctcgagttgctgtccatggtctctcgttactgttttctctgtgtttctgcctctctccttggccttggtaggtccatcccctttgtgaccttggctgttgctctcatggacaactttctcttgctggtccttgtagtcctggcatccagcttctcgacacgggacttgtcctgccagtacctcagacttgcacttaaaattgaactagcaccactgtcactctccagggcctcttcttgttaattagatcattagggatgttcagaatcccagcatcatagtatgttcctcctcccgctaccccaggaaccctaaccttacctcctcctctctatctactaggaggtggccctcagagtccgtctcatcttccacctgaacttccctaataggctccagcagctgccaccccgggggctgagtacttcctccatgccttgtgcagtgctgagccctttacctgggttctcctgtttgctccttattacagccctgcgaacagatactgctcttaattccatcttacacctaaggaagctgaggccccaggtaaggtgcatccaaggtcacccaggtagtagacagtagagccacgatctgaaccaggcagtctgattcagagcctgtgttgacactcagccacctagaacacagcttggattgtgggtttctattacctgttcaaaacccctacatcccgggtctgtccctgcacgtgctctgtggcctggctgcatcttccttgaaggcagtgcatgcctcttcactcagggggcccatgcaggaacagagggccccacagaaggatgaggccagtgcagaatgggctggaggggacaatgctgaccaggaagcaagtgtagagaaatcccaggaaacctggaggagccagagacaaggcattagaactcctcgtcgtgacctggtctgcattctctgagtgtgctgcttctgttagctcgcttccttggtctcaggttatagtttaaggcattgtggagccctaaaaagcctgtactctgtttttacctgttttaggaccctttcactttggggatgtgttgattttttttttttttttttttttttttttgagatagagtctcgctccattgcccaggctagagtgcagtggcacgatcttggccactgctgcccctgcctcctgggttcaagcaattcttgtgctcccgcctcccaaatacctgggattacaggcacccgccaccacactcggccaatttttgtatttttagtggagacagggttttaccatgttggtcaggctggtctcgaactcctgacctcaagtgatctgcccaccttggcctcccaaagtgctgtgattataggcgtgagccaccacacccggcctgaaatttaaatcagaaataaaattttgatcccaacagtgatgccaggcagcccagatctgggggagagggtggccttggccagctgggcctttctctgtttcccaagtcttgctgcctctccctgctgggctttgcagcctgtgcatgtctctgtgcctttgaccttgtttatccaaaggagaggatagaatgaagtcatgattcctggagccctgagaaggatgctgtggagaaatttgccggtagaatctagctgagtgtgttgctgaggtgccagcattgtgtgtggggaggctgaccgcttggcctgcctaggcccaggatgctccatggccgggcacagaggccacttggctgtcaggtgtcaggagcctgcagagggcacacagagcctggaccgcaggggggtcctgctttctcacctggcctccttcagcatttctgtccctcagtccttagcaagcccaggagctgttgagtttggcaggtgccgagtgctgttcctgcctgtgtagctgtggctcagtcctgtgggggccccgctgtggcccgagtgcagtgattcgaggcgctgagtgttccctgactccttctccaggagctgtgttcagactttcgcagctcttggcttggagctcctggagggcttggcattgccgaccaatgtggaggtcgacagtgagagaggaggaatgctagctttcttgaccagtccattaaataagtgggatattggccaggcacggcggctcacgccttaatcccagcactttgggaggctgaggcgggtggatcacgagctcaggagttcaagaccagcctggccaacatggtgaaaccccctctatactaaaaatacaaatattagctgggcgtggtggcaggcgcctgtaatcctagctacttgggaggctgaggcaggagaacagcttgaaaccggaaggtggagtttgcagtgagccaagattgcgccactgcactccaacctgggcaacaagagcaaaactctatctcaaaaaaaaaaaaaaaagtaggatatctgtttctgcttagaaaaatcagaattttctaaatgccaggtgttctgaatacgtaagtatgggagacgactcagcctgtttcatttttatgtaaaatcttcgcgtagccatgtggcactggaccgagatgaaagcaaagacatttctccttaactttgtttctaggaatgttccggagaatcacagcagctgccactaggctgttccgcagtgatggctgtggcggcagtttctacaccctggacagcttgaacttgcgggctcgttccatgatcaccacccacccggccctggtgctgctctggtgtcagatactgctgcttgtcaaccacaccgactaccgctggtgggcagaagtgcagcagaccccgaagtaggttcataatgccccacagcccagggcgccagcccagcaccctgtcctgagactcccagtaacctgagctttggccaccgttaaagcattttcattttccattttttgtgagggcttgtgaaatttctgctgcatattaatattcctttcatggacagcatattattgggacaaacatgcggtccagctaaaggcattcaaaatagcagttgctttctaaatgcgattttctttggcaggttctttgacaccattgcatcttgtgggatatgcttgtcatgctctgtggctcctactaagttctagtccttaaattggttccatagccagacatgttgcaatgtcttaacctcattataaagtaaatgtggttctggttatccttagataatgaagtaacagtgtagcaaatttcaaaacctcttggaaatgttattttaccattcaaaaaggcttactaaggttctcgttatgggtggccctctttttgcaaaaggttttcaggcttaagctccatttctaggtgctccaacactccattatttgtatatgtatggaaataaaagctgtgaccacccccaaccctggcccccgcccagctgaatcctcagcacagtatttctggaaggctcaagatcccacgctggggaaaagaagttctggagacaaaagagggcaggtgctgccgtgcctctctgctcagtatggatactggaccttgtgctgccagggctcccagtagggccagttcatggcactcagctggaaagtccactgttgggaggcattcttaaccatccactctgtgccgtatgtagtggggtctggtcattctgttggaggagacagaccagtgacgacatttgaaatgcttggtggatgtcttaggcctgttacgatgactgagcactgtgggggcaggagacagaaagtcagtgtctcctagttctgtgctgctttaacgtgcatagaaatcagctgcggattcagcagatcactccttttctgacagatgggcctgcttactctgatgttatatcagaaagctctgaatctgggaattgtgtcccctgaattggagtaacagaaatgcttagatgatgagtgtttaaaagaaataaaccaaaggtaaatttagtttggaattcagcaagcgtcttcattcagccctctgagggcaaactacagctttttgtaaatgtaggtaaattctgtgactgtttcgtgaccccctctgatccagttttcctttataaccttctgtattgttccttctattatcctgaaataacattaatagattaggctgggcgtggtggctcatgcctataatcccagcaccttgggaagccaaggcgggcagatcacctgaggccaggacttcgagaccagcctggccaacatgatgaaatgctgtctctactgaaaataacaaaaattagccgagcatggtgacaggtgcctgtagtccctgctactcagaaggctgaggcgggagaatcgcttgaacctaggaggaaaaggttgcagtgagctgagatcgcgccactgcactctagcctgggtgacagagtgagactccatctcaaaaaaaaaaaaaaaaaaaaaaaattaatggatcaatggatttttaacctaataattaaatttcaaaaaatatcgttctttaatggtaatgtaaaggtaaaattaagataatatgtaacaagcatgtgagtgtctaaggtgtccccgtggtggaaggaaaaaataaatccccataagtgtccaagatgcccatagagagcagagctgttctggtttaaacccctgctcttagcactgtgtttttccagctgtgggtggtgggggatgagtatctttttatttccatgagatgagaaaaatgaattactagaagtgtgaaatacaaaacacagctgctctttttttagccatagactcagcagccataaaattgctgtatccagttgcagaaattcctgctgcttactcttgaccctctctcggtttgtgtgcatctcctctcaggctggctcccagatgggagctggctccaggcgacactgggtgctctgctccaggaggtccttatgtgggtcctgccctagcctagcccctctcttatggactctgtcactgtgggtttatgattcactctcaatctgtcttacctcttggtgaactgttagagtcctgcctatactttggcgcttgtgggtgtgttgtggtacacatgatgtgttggtcacttcccagctcatcttgttctgagtcaccctagatttgggacattcattcgccaccagtaccgggcggtgtatggcctgagatttgggggggcttgtgctgctacaaattggggctgaatttgagttgacagtggaccttctttatgtctactgctcatatttgaattgcaaatactgcctcttctctttcagaggctcattaccctatagctgtattattgcaaagtgcacaattacagcttgagtgtaagtcacactgcgctggcaggacggcccactgagaaagggcacgtttcctgttcgttagttttcacattgacacataatttacaatacagtaaaatgtacttttctatcaactgtagtcagtaacagcccccctcccccaaccacatcaagatatagaggagtgctgtcacttcaaacagttccctcttcctctgccacatcctgcccctccccaggtctaaccaccaatccgtgctctgtccctctgttcagcccattgcagaaggccatagaaatagaatctataggctaggtgtggtggctcatgcctgtaatcccagtattttgagaggctgaagtgggaggatgacttgaggctgggagttcaagactagcctgggctgcctagcaagaccccatctccagaaaaaaaaaatttaaaaattacaatcacgtccctgtagttcagctgcttgggaggctgaggcaggaggatcacttgagctcaggagttagaggttacagtgagctatgatcgtgccactgtgctccagcctaggtgacacagcaagacgttgtctctggggaaaaaagaaagaaacggaaccacgcggtgtgcagccttctgagtctggcccctttcggtgagcagtgtctaaagttctgtcgcgtgttgcccacgcgtcggtggctcgctccttgcaactgctgagcattgtatggctaggctgtagtttgttttcacttcaccagttgggaaacagagaaaaggcactttttaaaaagtttaaatctgtagaattttggtttttaccagttctcttctaaatcctgagggattacaggaaaagttgttgtatttcagaatattcttagcttgatgtgacctctgtccccgttaaggccctttgccgcaatgggaaggacgtcgctcggtcagaccctgaaggtcagaggggcagtttgggagtgtgtcaacattttaactgtatggactagagccaagagtctcaaggtttataattcccacgtattcaaaaagaaaaaaacaataaagtgagaagtcagtgtagagtgaaataacctgtgttagtggggaagaagtgtttttaaacaggatttccataacgtataacatcaacatgtttagagtggtgatgtttcattgggaaacgaacagtaaaacatgaaagcagggaggttttcattctggcagttggcaactttcacggcagatggagaatttcaaaagcaattgctcaattatcaaacatagccagtgtgagttctgaaataaaggtgctgattgaatgtgcagctttatggtggattttgctattcaggcaagcattttaattttctgcctgttaaattctgttttctttagtttttcatatgtggtttattgtagcttaggaatagataactgagagtatatattacacatacaacattctgatatggcaatatttaaaacaacttgtctgttttagaactagaattaaacataatcatcttcagtattttgcaaataagctcactgccatccagaaacattgtcaatgcatctgttgctccttctagaagacacagtctgtccagcacaaagttacttagtccccagatgtctggagaagaggaggattctgacttggcagccaaacttggaatgtgcaatagagaaatagtacgaagaggggctctcattctcttctgtgattatgtcgtaagtttgaaatgcctgtaaacggggttgagggaggtggggaccaggagaacatcctgtgtagatgacacttgcatggaccctctggaacccagaccgcccggtgtcctgccaagctccatcgaaactaaatctagaatgaatgtttacttctgctgtgacatataattggagaccaggcctggccttccagtcactggattctaagttggactgtgagagtttttgcagctgactcatttatcaaatgcccggctattggctcacgcctacatgatgctgggtatgtttgttaatttgagggaagcaatggaataataataactaatgatttaaaaaacaaagtaagtgcattgactgtagtggggttctgattttaaatttttttaaaaattaataccaggagcagtggcttatgcctaaattccagcaactcgagaggctgaggtaggaagatcacttgagcccaggagtttgagacaagcctgggctatggtgtgagacacccatctctaaaaaaataaaaaataaaaaattatccaagtgtggtggctcgtgcctgtaatcacagctctttgagaagctgagggcggaggatggcttgagcctgggagttcgagaccagcctggcaacacagagaaaccctgcctctaccaaaaaaagaaagagaggaagaaagaaaaattagcctggcgtggtggtgcatgcctgtggtcccagccacctgagagactgagaagggaggattgcttgagcccagaagtttgaggctgcagtgagctgtgactgtgtcactgcactccggcctgggtgacaaggcgagacccctgctctaaaataatttttttaagttaatttgtagaaaaggtgttagatgttctttgtcacattttatgatggattcctgtttaaatgccgttctctttaaagaaaaaaaaataacttgtgggagtttttaaccataaaactagcatcacatatttaccatggagaatttacaaaaaaacaaataaacggaggaaaataaaacctcctgtaatcatactactcagagataacttgctgttagattttggtctagatttaatactttttctatatttatattaaaaatatttaaaacatatgcatttctttgtcacaaacatggtatcttatagatactactgtcacatagcaaaacagtgttaaatattctgaatcagaaaaggaagccgactctccaactgaaagaggtgttatcctagagactttttctggtgatgacaatttattaatagtcactttttgctttactttctctattgaagtagtttttctattttgttctacttttaaggataatataatttataatgctgtttttcacagaaatataagaaaaaagatactaattttataagttaataaagtttgatcatcccaaatccaaaaatctgaaatccaaaatgctccaaattctgaagctttttgagtgctgacattatgttcaaaggaaatgttcattggaaggtttcagattttcggatttagggagctcaacaaataagtataatgcacatatttcaaaacctgaaaaaaatcctaaattcagaatacttctgatcccaaacatttcagataagggttattcaacctgtactgtcagatgatcccaaatgaaaaatattaatcgttaaccaaatatcaaggaattgatcacattttacagtttctgcctaggattatgaatcaagatgaaaaggctctgcatgtttaaaaatatatatttttattttcttataaatcttaaatatctacacttaagatttatttgatatgtgggatccattcatattttggattcaacagttctgtcaaaactgtggcagtgataggggattctttttttcccactgaactatcacaaaattggaaaaagagtaattggagaaccccactggcttagccggcccgaagcccgggagagggcaggcagtgctgtggatggggtcatcccagcgcaacgctgcccctgctacctgcggatctcgctgaggcctgcctttgtcctttgacccttggccatttgttagtgtctctgagagctggactgctgtaccctacttccccagggggcctaacttcacacagcctctgccgcagtgcgtggttggaggtgacggccttggtaaatcgagtttcctacctcctcaattatttgtgctcatacactgtatatttttagtgaggtttatatttgggatgtgttttctccttcttaccctttctggcctttctatggcattaatacctggtctcttcttgtgtacttgaaaatgaatctctcatcatatttttccttagtgtcagaacctccatgactccgagcacttaacgtggctcattgtaaatcacattcaagatctgatcagcctttcccacgagcctccagtacaggacttcatcagtgccgttcatcggaactctgctgccagcggcctgttcatccaggcaattcagtctcgttgtgaaaacctttcaactgtacgtcttcatcctgccgactattgccagttgcagttttccctgccttaaaaatggagtattgaaatttttaactttaatttctgatttgcaaaatagtcatcttttgttcttttccttcttgctgttagccaaccatgctgaagaaaactcttcagtgcttggaggggatccatctcagccagtcgggagctgtgctcacgctgtatgtggacaggcttctgtgcacccctttccgtgtgctggctcgcatggtcgacatccttgcttgtcgccgggtagaaatgcttctggctgcaaatttacaggtattgggaagagaaaccctgatattgatttatattgaaaatttagcaggccaagcaaaacaggtggctggctttttcctccgtaagtatggtcttgacatggtcaccgatagaaacatggaaacatctgcaaacttgccgttactcgtgtgtccgatctgactgtttcttgtatttttttctagtctgcccttactaggatgaactgtacacatcagttcatcctttttaaatgagcatgaggttattttgggttgttaggtgttacaaacacactaatgtgtttttgtctattagagcagcatggcccagttgccaatggaagaactcaacagaatccaggaataccttcagagcagcgggctcgctcagaggtaatgctggaaacacaggtcgtccttgtgttaggacaacccaggatataaaggatatagatttgtacgggaataaattcacaggacaagaaatcgatgtgccttataggtgggtttactgcagaagtgccataatagaaccttcctacttttaaaacaaccagatctcactttctaaagagtaaaggatgaccggcaggatcacgtctgtgacgtgagtggaggcagtttgcactcctggtggctgtttgagaggtagcatttagaatgcctgtattcactgtcctgtgatgagtgggaaaataggttatcaggtttatcttagcaaaatcaaagcatgtcatctaattgctaaacaagagttggcaaatctgagagacattactcaatccttggcatgcaggacttacatctgcatcctgttgccattttatgtcttcaaagcatttaatcatttagttgtgtttgcaaagtctttgagaagcctttgtcagaaatccctacatctcctatgtgagtgtatttccatgactgcagaataagttaaacttttacctttttccttcccttgcggggcggggtggggggcagggattgtgtgtgtgagagggagagagagacagcagagaaggagaatataattatcatgctgtgtactttgagctgaaactgcaaaaaaggaaaaacacacaaaaattattatgcttttcagtctttagagtaccttgtctattatgcttttcagtctttagagtaccttgttgatggtgtttttaaatgggattgggcacaattaggtggacagtttgggatgatttttcagtctgtagggccaagctcttttgtaatttgcattatgaagttgtcactctcatagcagatggcgggagataaactattattactttttgaccctagacttagtcttcagtccagatgagggagattaaaagattataaatatcttgtgccagatgaggtgattttattttgaaatgaccatgaattcctatcagttgtcttactgggatatttgatagtggaatttgtgcatttgagtcttagatgatctgttttacatttattaagaaagcctttattagcttttatactgtgtattgcctgttgcagtgtttgagtataaatgaaatttctggaaaatattaatggagtacaaactgtgatacttaaaagtaaactagggcctgcatttgtatcatgacctgtttgagtattgatgagaagatagctgtgaagaaaaaggtttaaacaagtgtattttcctttaagaagccactaatagtgcatctccttagagtgtatatttctagaatcctagtgtgcagagtttagactaagactaaaaaaaaaaaaaaacaaattatactgtaatttcatttttatttgtattttagacaccaaaggctctattccctgctggacaggtttcgtctctccaccatgcaagactcacttagtccctctcctccagtctcttcccacccgctggacggggatgggcacgtgtcactggaaacagtgagtccggacaaagtaagtgtccagcgtgtctgcatgggaggcacagggcgctgagtgcctctgtcacctgtggcagatacagagagtgcagaggaggtgccgtggacccaaggagttctggcgctcggctcggctcagtgaagctgtggttagagacgtggggggccatcaaggtctgagggagccaagcagtgctgatgtgggacccttttggtaggagtgtggggtgagtagttagtgggtgaatcaaggaatagtcggccgtggcctgcaggcccctgactgcacaggccttcaagcacatgtcaatgccgttagcctccctccatctcctcataccttctggccacctgtgagttgcactgccactgccagccattctggtatgttgtcagcacctccactgctcatacctcatggttagggaccacctggagccttggtagagccttggtagagccttggtactctactttcctggacaaagttcagcttatgaatatgaatttagatttcaaaaaccagcagcccaagtataagaaagcgaaggttcagtcctgccttcttaggctctattcgctaagcacctgccctgccctggttgctggggagagatgagtaaagcagacaacccaggagaggatggcaaaggggccgctaacccttagtggtttagctatatttggaaggcctattggaagttcaccaggtgaagggggaggctgtgagggtgcccaggcaggtaacagaagtccaaaggggaaaacctgtggtgtggtgagccgtatagccacagcctgccggccggcagccctctcagcctagtgcggtgttcccaagcactggcctaggcctgtagctccagggatgtgaagtccccttgaacgccgcccatcatgttccccttatccatttttttcttcccaggactggtacgttcatcttgtcaaatcccagtgttggaccaggtcagattctgcactgctggaaggtgcagagctggtgaatcggattcctgctgaagatatgaatgccttcatgatgaactcggtacggggggagcagtggaggcaaggaatcctcagcttttcttgtgacttccaagtgggatttgtctcatcatcatgtgacccacttgttgacaacacatgttggggactccagtctgggcagggacgggatgtcggagagactccactctgaatggggccgggaagtggggaggactccatttcagatggggtcgggacatgggggttatgctgatcgagacagaaaagcacattgtttcagccacattagaatccacggaggtgttgttttgaaatccagctggccccaaggctgggtgtatggtttgggatgagaactatctggcctccactggaggaacaaacacaggatgttatcatctaagctccatggccaagacagaatggaagtcaaggttgcgtatttgccgtagacttcaacacagtgtcgtaatgcgtgacgtcaataacttgtttctagtgtcttggaagttgatctttagtcgtaaaagagacccttggatgcagcgagatttcctctactcacacctctgttagatgtagtgaggttcttcaccccccaaccccagatgtcagagggcaccctgcgcagagctaggaggccatgcaaagccttggtgtccctgtccctcacccgtgggcaggtcctgtgagcagtgggggggccacctcttgggtatggtgcagccatggcccaagcagggcttcttctcagacctactaggacgggagaaacctcctggtgctttagccctgcgttgatatgcagcaaatgggagggaagtgggcacctgggaggacaaatgcctgtagaggccgggagtgacggcaggtgttcatgaaaagagaccttgtggggagggcaacacaacagtgtgttctgatgtactgaagagctcaactgaaaacaacaggagaattagcccaaaatccatttactaaaattgtttatctttttttttttttttgagacaaagtctcgctgttgtcccccaggctggagtgcaatggcgctatcttggctcactgcaacctccgcctcctgggttcatacgattctcctgcctcagcctcccaaatagctggtattaacaggcatgcaccaccacgcccggctaatttttgtatttttagtagagacgggatttcaccatgttggccaggctggtctcaaactcctgacctcaggtgatccgcccacctcggcctcccaaagtgctgggattataggcctgagccaccacgcccggcctaaaattgtttatcttaagattcatgcagtgaaagctaacttactgagtgataaatttgcttagtgatctgtttattaggttttccaaatttgctaattgggctttgaacagctgtaaaagttctgactgtaaaagaaagcttcaacttttggcattcatgatgcttttctgagtattaaactaagatagatgttttacctgaaggatcggccaccaatctttaaatggctaaacaaaagggttgctaaaacataatccaaattgacataagaaataccatttttccaaccaaaattttggcattcatatggctacttttacgtatttcagctgcatttgaacatctttttcaaactttagggtggttggtgtatcactgaggtcttggatgacactttagctttgattttgtttttatgaattaaaattgtcataccaaaatttttatttcaagcaaatccaagagcataaaaaattaaaatattacttaaaatactaagagagaacagatatatattttactaagcatatgttgaatgaaattgttcaaatatttataacaggcatagagtagaattttcttaaaaatatttttgatggtataccaatttgtattttctcagaaacatttgccttattcttttttctgttgtgtttttcttacctgattgaaagctcataatctgttgttattgtttgttaacctttaatgctctgatttcaggagttcaacctaagcctgctagctccatgcttaagcctagggatgagtgaaatttctggtggccagaagagtgccctttttgaagcagcccgtgaggtgactctggcccgtgtgagcggcaccgtgcagcagctccctgctgtccatcatgtcttccagcccgagctgcctgcagagccggcggcctactggagcaagttgaatgatctgtttggtaattaaaattaaaatttatcttatttttaaaaagcattccagggccagtatagtactttgcaccaagtaaatgtacaataaaggcagtggatctaatacattgaaagcgtttacagaggtagctaaagagcagcacgggtgtcctcggctcagaatttcttcctgtgtgtttgccactttgccattcattgacatggtcatggacatagggctctaagcccttgaggaaggctgggccagacctcaggggagatgcagccccaaaccacgtgcagtcctgtggacggatgtgtagatgtgccactgaggaacaatgtcttgagctttcatcagattctcagagaattgcttgactgcctttcgaagttgatgcatctgtgctcacgtttgcacccacccacgaggtccttctgtttcaggggatgctgcactgtatcagtccctgcccactctggcccgggccctggcacagtacctggtggtggtctccaaactgcccagtcatttgcaccttcctcctgagaaagagaaggacattgtgaaattcgtggtggcaacccttgaggtaagaggcagctcgggagctcagtgttgctgtggggagggggcatggggctgacactgaagagggtaaagcagttttatttgaaaagcaagatctctgaccagtccagtcacttttccatctcagcctggcagtaagtcttgtcaccgtcaagttattgtagccatccttcaccctcacctcgccactcctcatggtggcctgtgaggtcagccaggtccccttctcatctgcacctaccatgttaggtggatcctaattttagagacatgaaaaataatcatctggaagtactttatgtcttaagttggcctggacatgtcagccaaggaatacttacttggtttgtgttagtgcttgtaattcgcccccagaatgtgtacacgttctggatgcattaaagtctggcctgtatccttaaagggccatcgctgtgctgcctgccctcagcaaggacacactttgcagacccacagaggctccgcctccacctcacaccaaagaaagggaggagtccaaagggcatcagtgccattactcacaaaatgataaatacacccttattctgaaccacgtggagtcatatggtttgtgatccctgtccttcaggtttcagcttagtggggaagtgggaaagtcagcgtgtgatcacagcacagggtgattgctgctgattatattatgtgcctgctgtatgcaggatgaaatactttatatgcgtcatcttatttgactctcacaaccccctgtgagataggctctgttactcccatttgacaggtgaggaaagcaaggcttagagaatttcagtgacttgcccaggtcctctgagctaggaagtagccattctggcatttgaacccaaggcctgctatccctagaacccacgctctcaaattcaacctatgacagaggcaagccctggtgctgtgggagccccaaggaagagcctctggcctggtggccacgtagcccaggagagatttctacaggagcccacagcgctgaaggagagagaggcagcagagtaagggggctttgtggcagagaggggactggcactttggggaataggtgggtcaggactgaatgtaatggagccatgtcagagctgtccttctggaagggcaagggcacctggacgcgctgcccctcagtgctttggacggttccacaactgtgattcacacggcttccccaaacgaaggtacacgagtgggcattctgtgactcggtacttccctttaggccctgtcctggcatttgatccatgagcagatcccgctgagtctggatctccaggcagggctggactgctgctgcctggccctgcagctgcctggcctctggagcgtggtctcctccacagagtttgtgacccacgcctgctccctcatctactgtgtgcacttcatcctggaggccggtgagtccccgtccatgaacggtgggttcctatcatagttcctgtctgcttcaccatgtttttattttgtgctgcctgtttgccaggtactaagctaggaattggggatggagaggtagataaaatatgcatcaggaagggctgggccccatctcttactctccaatatattggagtctacactggaatttaactggaatttgcttttttagtcattttatttagattttgaagtttcagctttcatcaaaaatacctctaaactttatgtctctgtgatctttggtcttagctgttttatgtatttagtcttatatgatcataagattaataacattacattcagaagattatttgttttctgtcagagttaaaatgtttgtttttatactgcattgtaatattaacgtactgtaaaataaaagtggcttgttcttttcaaggaacagtatcctcaacaagggtcattagccacaatttttaaaaaattggacgtcatagtttacatgttagagggcgttttgaagctttgtatttttaaattaaatgttatagagtgatgttttcatgtttcataattgttttcatctgtgcatttgtagccaacttgaaaacaaagatccagggattactacttaaaagccagacttcttggaggttatagtgatgattttgatagtatcttgagccgtctcataataacctcagggtgagagatggccaacaggagacagtcgagggacttagaaatctgaatgaaatctgaagttcaaatcttcagacatataccactaaccaagagattggtacctcagtctagtattgtctgtttgtctaaaattggttctaaggaatctaggctagtctgtctatccctttcaacttttgtgaggctgcacaaatgtaaaatgttgaataaaaagcactgatggaagtgtgtagaaattcttctctttgttctgttgtaattttagttgcagtgcagcctggagagcagcttcttagtccagaaagaaggacaaataccccaaaagccatcagcgaggaggaggaggaagtagatccaaacacacagagtaagtctcaggacccatttttttcttacatgttgttcctccaggacttaaaaatcattcacagagacgtgcaccgcggtgagtgtggactcctggaagcgcaccgtagctccgctgtgtcctgctgctcctccctagctgtcagggaggctgtagtccattgctttgccagctcttttgtttccgagtgaacaccttatccgtacacatgcggctgtctctgaccctacagaccagctgggatgccactgggggagcgctcccttccccccgcacttcccacactctgcagttattctgagatccttgagggcagggaacaggtttgtcttctttgtgttctcagaaattaatgctcggcctctggtcagcaagcaacaaccttttgttgagtgataatgaataaataaatgtttcccacatgagtattcagtaacctcagtgtcaggttcagccatctgttttggtggatatttaaaagaaaattccgcttttcctacagaaaaaaaaaaaaatccaaatcccagtgatttaagccagttatagacttagacatatactacggcttttcatgcactttcctcccaattctagagtaggtattttactaggaaaatggtggcagtgcctgttgggaggaagattctttggccaagtgtcttttgttcttgccagggcccctaggctgctggggtgcttcagcttctttagcccagtgtctggtggggaatggcccctgttgcctgtcccacagaggtgggggtgcctcacctggagcctgtccacacattttacacagcacgcttacctggagcatcaggcatcttttccatgctctgtggctcaggaaacacgccttttcaatcatgagtgcaccagtgcttttgggctttttctccccgcttttgtgcaatcctggttgtggatggagttttcctgtctttagtcttctgcatagtacttttctcttctggttcccggttcaaggttttgtaattagagaatgacccagaagcaatggcattttaatgcacagccaaggacttctctgaatttgtatctcaaacctctgtgggtccttcaggcttcagtttgtgatttcatgatttcttgttgctacctaaggaatatgaaaacacccacctccctactctgcatcttccagccgagtggcacctcaggctgtggatcctgtgcttctgtggtgaggataagaatagtgccaaccgtgtggattgaaatcaatcagttaatccctccatgtaaagcacctggaacggatgacagtcttgttatgaatactcaacaaatgctatcatgatttttagttagatttccattgctttaaaacagttgagacatcttggcggtttgagttagagcaacgggccctgaagtgggttctgtttgggtgaagatgattatgcttattccccatggccctctttaggcaagagtgggaagctttctttgtttttttaatcacctcgataggacgttacttcttaaaggtcatccaataaatattaataggccgggcgcggtggctcacgcctgtaatcccagcactttgggaggccgaggcgggcggatcacgaggtcaggagatcgagaccatcccagctaaaacggtgaaaccccgtctctactaaaaatacaaaaaattagccgggcgtagtggcgggcgcctgtagtcccagctacttgggaggctgaggcaggagaatggcgtgaacccgggaggcggagcttgcagtgagccgagatcccgccactgcactccagcctgggcgacagagcaagactccgtctcaaaaaaaaaaaaaaatattaataaagccaactcgttagcgtggggcttaattgcttaagtccaatgagaagtccttctctatcctaggaagttgcccaaactgtagaatctcgtggcctgtgggtaatagccacgtaatacacactcactgcctcaacaaatcatattttagtaggtatgatattctagactcaagacaccattctgtggatcttcccaagggtgtgaagtgtccacagcgtctgccttgggagtttccatgcccaccagaaccatgccccaagcccctcaagcactctgacctaggaaagccagtgaagcaaggatgacaacatggccctttgatactagctgagggacagacacaggtcctgggagaccagagaaagacgaggggcagaggaggtgtcctaaaggaagtctgaggctgaggagccacaggatggcttccagctgtcacaggctgctgctggccttatcacagagagtgggccagagggctgggaaccaaggccagagctcaggttcaggaccattccagcaatcccagcagaaaatggggagaattgtatggtataggcggatatgaaggtagaatctgcaggccttcagtggccaactcagagtctaagtggattccacagttacagcttgagcagctggttgtaggtcatgctttctacactgggcatataggatgtgttttttaaaaagtcctctcttaaccgttgcttgtttagatcctaagtatatcactgcagcctgtgagatggtggcagaaatggtggagtctctgcagtcggtgttggccttgggtcataaaaggaatagcggcgtgccggcgtttctcacgccattgctaaggaacatcatcatcagcctggcccgcctgccccttgtcaacagctacacacgtgtgcccccactggtgagtctgctcgttccttgcagaagaccaagtacggtgaaaggcaccggtaggccctgggctgggcacacgtgagagggcgggacagaatccccgcagcccagaggctgcctgctgtggttctggtgcccactgtggttctggtgccaggctgctttcctcaggcaccacgtgtggaggtcgctagtagaaatactgggttttctaaaatgaactgaggccctacatccctaagagattagtgttagacctgattctagagcaactagaccactttgcttaatagcagaccagaaaccacaccccctcgagtgagtgagattttcctttggagataattcatgtttttctacacagttttgcagttgtcttcagaattggtttaaagtaggtgttattgccaggcgcagtagctcatgcctgtaatcccagcactttgggaagccaaggtgggcggatcacttgaggtcaggatttcgagaccagcctggccaacatggtgaaaccccatctctactaaaaatataaaaattagccaggtgtggtggtgtacgcctgtaatcccagctactcaggagactgagacaggagaatcgcttgaacccaggaggcgaaggttgcagtaagccgagatcgcgccactgcactctagcctgggcaacagagcaagactccgtctcaaaaaaaaaaaaggtaggtgttattgatcagaacccttgtttcagataacatgaggagcttagcttgaggagagtgagggttgatggagggggactgacttctgcccagtgaaatggcatcatctcccaccagcccgctgaaataagatgatggggcctgttccttagggcctgcagcatcctcaggcaggaaagaaaggccgacctggcagggtgtgagccagcaggtgtaggtcagggagaatggagccaggtcccagggaagaggcttgtggctgcctgagaagggtgcgtgcctgcctgtgtgtgtgtgtgcacgtgtgtgtatgtatgctggagagtctagggaggcttgctccaaggacgcagtattgtttgatcctgagagataaggattctgccgcagggaatgaaggtattccagatggcgggcttattccgaagaagaggccagtgcctggcggtgctggaagcagttgcagaacagggagttgtaggctttcctgggaagagagcagcaggggtgctggagaagcaggccacacttgctgcatggggttgctctcggccccactcttggtgcacagcgagtcactgtgggttcattagcatctggttatgagacagtaactgctcctttggaggggctcgtggagaccatgcaggagggcacggtcttgaggtcatgccgtccagagcacacctgaggataggccaggacgggctgcacgctgtaggtaaaattcctccagcaagctcttcactggcattgaggagttccctgagtgcggtcatctggaaggcagctgtaacaggcactgcagtctctccctgggtgggtaccagagaggagcataggggagcataaccgatttaaagagagggctttcctgtggtgaggtaagagattagctggtcattatcatagagccccctctgcctttgtgcagatgggctgtgggaatcctggggttccgttgggtcctttgtcacctcactgaaggcatgtaagctgagctggccagaccgtgagctgatcctgccacttgaacagcatcaagcctgcctctggattcttctgtgcatggcacttgtctgagcacctcacgcacagagaactggacttcagagtttacagaaataagctgtatggttcattttcatgcctgcttgccaataaacatatctgagctgaacctcattgaacgcctgcctttattctagcacagcacctgctgtttgtgggcgaggggtgctgtctctaactcctgcctgcttctcccagcactccctgagtggggtgtgccagcagcctcaggatgaggacaggaagtgggagggcagagcagatttgggagggccacttgatggggaaggaagtcccaggaagcagttggagctgttttctgggggagaaggtgccagctctgggacagtgttggggtagtgaggagggagcccagtggagagaagtcgggcttcctgcttcctcacagtatgtctgtcctgactcaactcggatgatgtcacttccttttcatcttctcaggtgtggaagcttggatggtcacccaaaccgggaggggattttggcacagcattccctgagatccccgtggagttcctccaggaaaaggaagtctttaaggagttcatctaccgcatcaacacactaggtactcttggggcctctccttcaggtcaccattgtcggacatctaccgggaggaaatccagagcccccagtactgggatcttctcatttgactccagaaaagatttaagcatgataataatacaaacctatgtgaatacattttgcagtgttggcaaaactccttttatactgagaaaatagatcccagttcctgtgttttgtggcttgaatcccagctttgtgtattccgggcttgtttgaagtcaggaaaggttcatgtgtagtggacaacgtgagaccaaattctgccttagattttgcatttaggctaaacagtggcagcacttgtctcagaatgttttcttgtgttcaccagtctgatcctgttgtgtctcagtggtccattttctcatatgggaacaagcagacgggagcagatggagtcaggtttcttggcactcgccttccccagagcctagaggcagcatggggagaaagcaggcttggggctcagacagtcctggtctgcttccagccctcctacctgagcagcgcagggcaagtccgtctaacctctagagaccctcagttttgtcatatgtaaaatgggggtcgtgtctatttcatagaattgttgcagatttagaaattacatttctaaacaaatgttaccccttatttctaaataagtgtctaaatgaataagtcaccacttttgcccctatttgatggcaagaggtgtgatcttgtggtgggactgtaatcagtcagttctcagtgactgtgccctgctgtggtgtttcctggaatgttcctgtcttgtcctagaaagtctggcaggggcaccctgactccactgtccagtcctctccccagtccctcgggcttctgcagatttgaggcttgtttggatcccagaaggttgtggcaggagacaccttgcctctactttcccctttataattcaatgtccaaagagagccctgagcaggtacctcacgccagctgcctcacggagctcctcctcttcctggctgtgaggatcggtatcagtggcctcctgctctctcccccttgcctaacacgagcacctttgcttacttgggtgcccttgctcttgaactgcccatcggacgtgcgtgacccaagactgtgccgcagtccttgccttgtctgtgctcattttctttgttcatttttttccctgtaacgtaaattgttatatttgtctgtatctgtgtctgaatcagtcctgcacgctctccttctctctgtctcttgttctttctttaccccgtttatcacggggaccccgatgtccattgctctagttctcctgtcctaagcaccccatcccgtctctctggccttaccacaagtggcgtggctgcctcagacatcatgatggggacatgaagcacagctgtcagaaacaactgttcgttagatacactcgaatgcagctcatcaatagggatggagggtctgtcggatgtattttcactgaatccccgttcctaccttgatacactctttttaatctattcttctagacaggtcagaggaaccattactttgacttttaaatttttagcagctttattgaggtagaattcacatactacagatttcacccactctaagcggacagcttggtggccattagttttatccacagagttgtgcagccagctgcacagtctcagggctggactccagggaagattttagcccatttagtgagtggggcagaagtggccctggccctgcacgaggttgcctgcatgggcgtccctgccctgtccctgtgtctgctccactgggggttgaccaggctgccagggccgacttgggcctgtgccacctgcctctcatgtgtctcggacagtgcagccgatgtctatacttcggtttcctcaatgatgaaatggaggggatagtgttccccgcatcatagaactgtgtgaggtttaagggactcactgcccttggcgtggagccttctccaggggccgtgctgtgtcggcgtagctgtcagctctccgttacaggcttgagaagggttgacactctctcatgtaacatttatatttctaggctggaccagtcgtactcagtttgaagaaacttgggccaccctccttggtgtcctggtgacgcagcccctcgtgatggagcaggaggagagcccaccagaagtaaggccacaccctgtgctggttggcacatgggcagttatggccgcttgcaggcctttggtggggaataaaataaggcagcaagctggtgttctttttttctcttaccttatttttgaaagagtagctgaatggtgtcttgactgatattccagagcagggacaaagcctgctgaggtctgggggctgcgattaccaatggctggaatgcattttattacggtgcattccatgttaaggatcaatacgattgtgccctttctggaaaatatcttttagtttatcaatattcagaggagtgtaggttgaattaaaatgaaaaggcactttataaaggccatgagtagtacctggtttcatttttctaatgtcttgcagagattttatcaggcttcttgaagtgttcacgtacattacgctaacacgatattaataataactgtgctctggtacagcggagccagcagaatgggaagttgtggaatgcaggcccttgattctgatagaaggtgtggtttgaactcacagaaatgacagtttggagggtagacatatgtcacaagtcatcaagattgtctttaaattcatgcatagaagctaacagggtgtcataagcaaggcctgtaaaatgtatgagggaattcaaagataatttattaaaaagtaattcatgtttggagttttgtgcccaaaggagtccttgatttgaaaaatgggcttttgcccatcagattgtttcagggcccgtgtgtgcggaggccctgccttgtgccccgtgagctcagcctgacagaaatcctttggtagcacttaaggctcctcttcctcccattgaggcagggaagactctgggttctgcaggcagaggtggttgtgggtgtcttgctgctcttgttgacatgtgggctctccttccaggaagacacagagaggacccagatcaacgtcctggccgtgcaggccatcacctcactggtgctcagtgcaatgactgtgcctgtggccggcaacccagctgtaagctgcttggagcagcagccccggaacaagcctctgaaagctctcgacaccaggtttgcttgagttcccacgtgtctctgggacatagcaggtgctggggacagtgggttccccgctgaagcgtccagcagcttcaaccaggccgttttccttcattgctagaattgaaaacaccgtccgtgtggcctgtgcaggagatgcagacccaaaggtggcctcctggtcagtgagaagctggaaacgtgacaggaactgacgtggggttattgagcatttaggggaagacgttagcagagcaggaatgagcaggcaactagtagaacacccacttaagggctcacggacaggtgctcacttaggaagtgagtttcatttggtattacaccaggttcctttaggcaaagcggagggaaagttctggtgtttttcacttgtaagattttgaaggaaacaaaacactctttaccttttttctaaaatgtaggtttgggaggaagctgagcattatcagagggattgtggagcaagagattcaagcaatggtttcaaagagagagaatattgccacccatcatttatatcaggcatgggatcctgtcccttctctgtctccggctactacaggtacctgagggaaagggtgcgggggagcggttgtacttgggctagaatgagagaagactggcatgctcaccacaccagtgatgcgggaagacctgagtgtggtctgagttggaggctgtggtgctaaatacgctgcccctttcataagcaggagtcttagtcaggcccagggaggaagtaaaatctggaaatgaatgagaagcattctctcctgccagtcaagaaatgagaagcgaaagaattctcacgggctgtaagaccagcaggatttaaaagttgaattagttgcttatgttaagaactcaaccaagttcatctacacaagctgaatctccagcttttcctaagaaaccatgtgtggcagtggctgcagggcagggcacagctgggcctgagcaccccgctccctgcacctctcccctccctgggccctgcctgtcactgcccactctcccaccaagccttccggttgtgtgcctgccctatcacaggcatcggagcttgtcacctggtttaaaagaagagagttgtgtggggatttgggatgcacgtttttcactcaaaagtattttagcgtagagctctgtgattccgtagctatttaggagtttaagcaccttgaaggctttaattgcagaaagttctatgtggacgtgcaatgtgttatacgcagtgtctatgagactcaaatgtttattagggcgttgaagtaaactgagcacttggagggccatggatccagccttcaaggagctcataagtcaggaggacccaggagcaatgacctgtcatagaaggcagaaaagaggggcacagaggtgggtgggaggcatacacaggcagctcctggagctccaaggggagcaagtgcttccagggaagggggcgtggaggcccctttggaggaggcaagttgatctggggtctggcagagggttagctggggacatttagcgggaggctggtgcccgggaattggggggatgcccagcagaaagacatgaggaggctggcctggggcgtgggggggtgtgaaaggttaagtgggggcattatcctgctcccgctcctgccggctgtatctggtcagcctgggcaccgaggtggggttctggaaggcactgttcaccaaaatgcttatctgggtcccccagagagcttgcctgcctggactgtcggctcgcctgcaactgctgactcctaagcttttgcagctcagcccacaaccagttcctattcacagaggtgggagctgaggggtgacaagtgactgctgcagtcttatttgtcatagagaaaaagtgacagagtccagcttgcccactggccctgccagcttaactggttataaagtgacaaatccccaagacccacagggctctgcacaacctgggccctcctgccagtggcggcgagggcaggtggctcacggctgggtgcctgtctgggcaggagctgggctggtatggggtgggcctgcggccctgcccccctgtgcagatcaagactcagggtgctggtgttcacaggtgccctcatcagccacgagaagctgctgctacagatcaaccccgagcgggagctggggagcatgagctacaaactcggccaggtcagtctcgcgcccccgccgcctggcctctgtccgtttctgtcctcagactttggcgcttgacacacccaggagaaaagctcagtgcactttttaaatgaaaggaagttttccttttttttaaaaaaaaatttaatgttcattgtttttatctgttttattcctaggtcccgcaagcagaggaagcattagttttgtttttatttatgttctgtattccagaaagtagttaagagacctcacatgtagcgatagagatgtgtgtaagagacagtgagagggcgtgacttggacttaagcaaggaccgtgagacacaaaaaggggggtgaggacagagtggagtcagctgaaatgctcaggaggaagtagacgccatgaagggccatggtatggggggccgcaggcgtggccgtgagtgtccctggggccagctcttggggggctccctgagtgtccctgtccctgtggccagttctgggtgggagccccgtgtgcaggcagacagctcggccacttcctagcaggtcacattggtctgtgcttctgtttcctcctcagataagtgaagggattcaagggtctgggtgtggtggctaacacctgtaatctataacattttaggaggctgaggcaggaggcttacctgagctcaggaggttgaggctgcagtgagccatgattgcaccactgcactccagcctgggcaacagaccagtactctgtcccttaaaaaaaaatgtaaacagaaacgtagggccatttgcatatgatggcacatggcgtggagccctacaggtgtatgctgggcggggcccggctgtgctggccgacttgcacctttccctccaccccggtgctgtgtctttcgctcaccgggttcctgatttagtgaaagcagttgtgcaggacagttctctttgtagcttttgtttctgtggaaatgggtcagaatatggtgtttagaaacacttatgagctctgagagtttcctcttctgagttcctggcctgcagccttcacagcagaaaccctgtgatgtcacaagcctgtttctgttccctgctctctgcctgtactgtcctgttttgtgcctgccggtttcagtgacaggaagcagggagctactggaccagcctgtatttttctagacatagttggaaaaagaagtcccactcttctgtcctttcacctttgacagatgtttccaccccaagataagtgaaaatgaccaataggatgcactgtatttttcatgaaagtgtttctgaagggcaggctgagagtgagaggcctggggctcactgggtgcctctggccttgtcctgggcccagggacactggtctgtgcccgaggtattccctatccccccaaccccgctgcatttggccacatccttcaatgtttgcgttgtgtccagcgtccgcaaaccaactgtcatgggatcatactggggctgaagtacggtcccacccctgccctgtctggggctgaagtacagtgccacccctgccctgtctggggctgaaggacagtgccacccctgccctgtctggggctgaagtacagtgccacccctgccctgtctggggctgaaggacagtgccaccccttccctgtctggggctgaaggacagtgccacccctgccctgtctggggctgaaggacagtgccacccctgccctgtctggggctgaaggacagtgccacccctgccctgtctggggctgaaggacagtgccacccctgccctgtctggggctgaaggacagtgccacccctgccctgtctggggctgaaggacagtgccacccctgccctgtctggggctgaaggacagtgccacccctgccctgtctggggctgaaggacagtgccacccctgccctgtctggggctgaaggacagtgccacccctgccctgtctggggctgaaggacagtgccacccctgccctgtctggggctgaaggacagtgccacccctgccctgtctggggctgaaggacagtgccacccctgccctgtctggggctgaaggacagtgccacccctgccctgtctggggctgaaggacagtgccacccctgccctgtctgggatgtttagcccctagatgccactggactgagccgctacttgcttttgggaaagaggggtgggggttaggggtctgggcgaggggagtgcaggggctcctccttggcctgagagctgttcatacagactcctcgcccactccctgcagggtgctgggtcccaggggggaaatggcccttggtgccaagaacgtgagttggggctagtgccagtgatgatggagaacagctttttatgggcacacagcccacagcactgtgccaagtgctcgaggcttcccgagaaccaggcagaaaggaggacagtcgaggtgtgctgactgcgtggtggctgcgtgatctagagcgcgggtcacaaaggcgcgagggagctctggccttgggtttaccgcaatgactgccagtgcgggagactggaaaaggaatctcacgtattggttccgtgttttggggactccattcagatgtcacttaggagtgaaagcatcccttcgtagagcctctttctgtgtcaccctcctcagctgctcctggggttgactggcccctgattcatgcctttagcatgtgctggagcttcccagcagctgtccagcccctgccccaccctctctgtgggctcccttgcccgtaacctggggtgtctgaacgacccttgctaaggggcagactgttagacggtaggcatgtgctgagtcccagtggccacacccacccaccaggagcctggcactgtggccgcagcactgagcagtgccccgtttctgtggcaggtgtccatacactccgtgtggctggggaacagcatcacacccctgagggaggaggaatgggacgaggaagaggaggaggaggccgacgcccctgcaccttcgtcaccacccacgtctccagtcaactccaggttttccaatggcctttttctttttaacagaaatttgaaatttcttatcagtcatttgatttgtttgaggtgcttcttgaaatgagcctctcatctcatgtacttggaaaatacccatctcgcatattccacaggaaacaccgggctggagttgacatccactcctgttcgcagtttttgcttgagttgtacagccgctggatcctgccgtccagctcagccaggaggaccccggccatcctgatcagtgaggtggtcagatccgtaagtgagccttcccattcccctcacacctgcacgtgccacacgcaccacacacgccacacaccccacacacacacaccgcccacacacatgccacttgcacacacacccctcatgcatgcaacacacacacaggccacacgcaccatagacaccacacacacatgccacatgcacacacatacacggcatgcaccatacacacaacacacacagcacacatgccacacacacacgccacaccacatgcaccacacacatgccacatgcacacacactccacatgcatgcaccacacacacacacacacaccacacacaccacatgcaccacaccacacaggttacatgcacacaacacacacatgccacgtgcacacaccccacacaccacatgtatgtgccacacacagcacacaaccacacacatgcaccacacacatgccacatgtgcatgcaccagacacatggcacacactacacacacgccacgtgcacacaccccacacacatgtacgcaccacacacatgccacacacacatgcaccacacacatgccacatgtacacacatgtatatacacaccccacaccacacacacaccacttgcacaccacgcacacacaccacatgcgcacacacacaccacatacgccacatgtacacaccatacacacaccatacatgcaccacgtgtaccacgcacccacacagacacagcacacgcatacaccacacacacacgcacacatgcgtcccgcacagtaatgtctcttgggtgtaagaacacgacttgccagtagtagcgttctggatgcgttgcctggattctaacagcgcgattctccccttgccctcctggttttccacatctccagcttctagtggtctcagacttgttcaccgagcgcaaccagtttgagctgatgtatgtgacgctgacagaactgcgaagggtgcacccttcagaagacgagatcctcgctcagtacctggtgcctgccacctgcaaggcagctgccgtccttgggatggtaagtgacaggtggcacagaggtttctgtgctgaagccacgggggcccatctgccttgggacctggtgttggccagaggtgccgggtgcggctgcctccttccaagagttgacccgaaccggactccacggcccacgtgagctgcagtgcttctcagatggagggggttcagcgacggtcagtgccattcacaggtcactgtgatgtgggttgtggcggccaagccatggtttggggtcccgtatccctgggcttatgacatcattgtagtagcccatccccacagaaccacggtgtgtggtggcgctgaggcatcgtagatggtggaaatgctactggcttccccatgctctgccctgaggcctgactgcctcactccccttctcagttatgttccaggccccccgagcttcctggctggacagcttctctcctgggggccgttttgtcacagtgaccctgtgtttctagtcccaaatctgggtgctatagtctctttttagcgtggtggttgtcttagtcttttttggctgctaccacaagttaccttagactgggtaatttataaacagtggaaatttacttctcaccgttctgggggctggaagttttcatggtcaaggtgccagcagatttggtgtgtgatgagggctgctctctgcttcatagatggcatcttctggctgggtcctcacggtggaaggagtgaacaagctccctcaggccttttagaagggccccaatccacaagggctctcccatcatgacctcatcacctcccaaggccccaccttcttgtactgtggcactgcaaattaggtgtcagtgtaggagtttcaggagggatagaaacattcagaccatcccagcggtcaagtgttcatcctcttgagttcctccttattctgcttctggtttatcaggattcagccagtgcagcatggtacctgtattctgtggcacatcaccacatggtatttgccaagtatccatcacctgcacacgtgaaatcattgcccgtgggtcccgacatctggcgaagcatattcaaggatggcagaactgtcagagctggcacctctggttccttgtcatgtggcattacctagtaatccattttatgatagcaatggaaactcatttcttcaacaaacacctgagtggctgccgtgtgccagccgtctggggcccttggtgagaatggcatggtggtgcccatcagggcctgcctagcccgtgctctggacgggctcctgtgtgtcaggaacgacaatgctgtcatgacggtgaatgatttttttttttgccatcactccagccgctaacatttgcggagctcttcctcccgcacccccacctgacaaggccaagggtgaccttggccccaccctaggcggccaaggtcagaggttagctggcttgtctgggtcacacaaaatgcagcagaggttgaggtgagcacatgtccgtgacctggagcctgactccctctctgcgagtcttgactgctcttgcctagactctgtcctccccgagcccaaacgccagtcatcttcccttgtgggtgtccttcagcctggtgccatgctggtgactcagcagccgtccagggagtggaaacaattgagtgtgtgggttccctgtgtgggcatctctcttcacggcgaacaccctctgggtgttgcccacacgatgtcaaagcggctcttggaaggggtccttctcctttgtgggaagtttcagctgctgggctaacttgaattgtaactgtggttttgtgctcaggcccagatccccctaggcaagtgttgtgccatcagtaatcaaatgagaaataatcattttgaaaagcagatcctaaggcaggatggtcatggacactcactcccagctctttgtgcactcatgctttctggaagatggccatcctctgtgaaggttttcagcgcgtcatgcttggtacccacgtatccagagcatgtcgttttgaggtatttgcccaccgttgtgaaatccgtgccacccgagagcaggtcctgatgtggggctttcagaagtgggacctggggccgtacgcagtccttagggaggggccgtgtggcgttgtgcgtgtgaggggatagcacagggtgaggtgggggcccaagaaggaagtgacccacaaagaacagcctcctcttttggtccttgttcctgggatggctgggagtggcttctgtgtcgtccggccatttcccctgcggagaggctcctaccactgccgagaacctcatcattccacaaaaacaagaggccgcctggccatccagcgctccatgggaattctgtgtccccatagtcttgggctgaaggagggtgacattccttgctgacttctgcaggggtctcctcactgttaaagagcagattgaaagtgaagaacgtgggctaagtgtttaggtcgatatttaaccctgctaggttttggatactaagtgaaattgaggccattttggttgaagttgacagaaaccactatcagggatccccaagactaccccaggcttttctagaaagactctcagctaagatgtgttatggtaaaagcacacaaaacaaaatcagcaaagaaaattagcaagggcagaggcccatggggcgatgtcccgaggacaccaggcttgagcttccagaatcctctcccagcggggtcgtgcaggacgcacttaactccccgcacagtgagccgtgacagcgcgtgtgcagtgtcgtcgccaggaaagcacactagagactcggtgccagggtttttactgggggctgggcacatgggcaccctctgcctgcctcgtgcccagactctggactcccggagggaaggcaagttctcagcaccaaccctggtgcccacacaagcagctgagcacagggagcccctcctcagtgaggatggtgggcaccgtcccaacaccagccaggggccagccttgcacacaggcctctcaggatggtctccggcctgctgtgtagtctcttctgcacacaagcgtgagggcagcgcccccgcctcggctgtggggaggagccactgggacgtgagctctggtggcatgcagcagcttttgtctgtgtgtgcctaggacaaggccgtggcggagcctgtcagccgcctgctggagagcacgctcaggagcagccacctgcccagcagggttggagccctgcacggcgtcctctatgtgctggagtgcgacctgctggacgacactgccaagcagctcatcccggtcatcagcgactatctcctctccaacctgaaagggatcgcccagtgagtgggagcctggctggggctggggcgggggtctcagaatgagctgtgaaggaagcagcatcaccctctccaagtgcccaggctcctggccagatggcaggccaggtatcagtgggaacccaggtgggtgccatggctgaggtcagtgagacgcaagagcacaggtgcgtcctagaggcttcctcgggcacctccagcgagctggagctctcgcctctgctgctgtctcatgtggcgcttagcacactctcccacgtgcccattcctgactctgctctcgaggccatcggctctcattctctgctcccagaaccctgttattacccaggctagcctcctctctgcaccttccccgccctggcccagtacctccctcttgtttccactgtgattccgacctcaccttatcttaaagctgctggacggcaggttctgtacacacgtgtccttgacaaagcacggctggtgccgcaacccctcagcgagcaagtcaagctcttcacagcgatgtcttacaagcgcagagggctctgtgacaccctggtctcaccgccactcttccaaagtcgcagaggctttagcagagatgggcccagcctctctgagtcataggcttctgcacacgggagctgtctttagagggagggtggaatttcatcagccacccacatgggggagttgagggcaagaattaggagcaaagatgggaaggggtctgggaggaatggccagtgatcccctttgacaagtgggcaggaaacgggggctaggtcaaagttgagtggaagacctggagggagacgggaaggtctctgtaggcacagttcagacaggagggaggtgtgagccagggcacatgccggtggccgtctggcaggatttgggacatgctggagcagggacagcggctcatcaggggccattgccctcatccaggccagagtgtcacaagcccgtggggaggcccttctcgcctgtcatccttgctgggcagtgggtgctgtgctagcaggacaggcggacggctggcaactgtctctgcatccctggagcctggcatagggccaagtcacacggggcacaggcctgcaaatcaggcacatatgttggtgcagtgacgtgattttggggggcagccccagaacaggccccagacacaggccaaagccctgcctgtgctggtgtgttgggctgttctatggctcttgctgtgggcatggaggactcagggaaggagagttgaggtggtccaggagttgcgtttgggatgcagagagcttgtggcatccaggtagaaatggtgcgtggggctgacctcagcaccatgggcagaggggccgtgtcacgtgcctccgaggtggaggtgggaccacgtggtgacagatatacgcatcactgggcacgtttttgtgggtgttggggggcatcgtattggctcctctgttcacagtggccactcattcagtccctggctaccaggtcctcactgtgccatggggaaggccggcgctgtcgggggatcacagaaggcagcacgtcatgatggcatgtgccatgaaggaaaagcacagggcactcaggaagtagaggggactggcctggggtgtgggaatctagggcctcgttgagggacagagagaggaagtgtgtggtggccagcatggaggtggccacaggggaggctgagttaggccgagagggcagggcgttggggaggtagacgggctcagccactcagggagtggtcaagcagaggctgaagggtcaggccaggttgcaggggcctgggggagccactcagggtaggcgctcccgggagcccgcctggcccatagctctacactcccgcgtggggccggacatgctgtgaagccctctccacgttggatgggggtggctgagcctggatgctgtctcccgttttcagctgcgtgaacattcacagccagcagcacgtactggtcatgtgtgccactgcgttttacctcattgagaactatcctctggacgtagggccggaattttcagcatcaataatacaggtgagtgggccctggctgtcttcctctgcacacggggagtgggcttcccttctcttttccttgcaggatcataccagtgggccagttttgacttggtcgggaggaggcatgaacacctgagactgtgcagcgattctttgacacagaggcctttctccctgtgcagatgtgtggggtgatgctgtctggaagtgaggagtccaccccctccatcatttaccactgtgccctcagaggcctggagcgcctcctgctctctgagcagctctcccgcctggatgcagaatcgctggtcaagctgagtgtggacagagtgaacgtgcacagcccgcaccgggccatggcggctctgggcctgatgctcacctgcatgtacacaggtgagcatgtacacggtgcccataaggccagcccaagtcctgttcaagggaggcaggagcatgctcactcaagggacctcgactaggtgccctctgatttcacacttctggtgttgccccaagccggccccatcaccttgcaagaaaggctctggagcccccagggctggagtacctggtcagggttgaccgtccctgtggtcactcatcccatgtggctgagctgggctgggtcctgggcaagcaaggggctgatatcacctgctttcagatctccagggactcactggacccctgtgtacaaagcactgtctacagagcctattgggttgtatagaggtaaccttcgtactgaacacttttgttacaggaaaggagaaagtcagtccgggtagaacttcagaccctaatcctgcagcccccgacagcgagtcagtgattgttgctatggagcgggtatctgttctttttgataggtaagaagcgaagccccatccctcagccgttagcttccctagaactttggcctgaagctgtgcttttgtgtgtgtctgctgatcccctggcgctgttgctggagtcctgccagtgattccccaccacagcctgaccatgggctgccttggctcagggttccactggcgagctggtggtccttggaccccagcactcaggtgtagcgttgaccagttccaaggttgtcccagtgcctgcccatctctcctgagggctcagggacagtacctggcagttgggggtgtggcagggggcaggaatgaccagcctctgggagggtggggcagaagcctgtacagtgaggaggagctggctcagcctggctgcctatcgtgagaggggagcccacggggctgtgggaggggggccgtggtgcctgtgagcagggtgaggagcagcggcaggaggatgaaggtggaacccacacatgcatctttgagacccgtgtggtcagtggcttctgccccccaccaccccccactgctgtgcgtgcatagaattggcttccctcacctgctctggaagtgggttaggagcttggtagggctttttctcaaggacaagggcccctgatttgctctcaggcctcagtcctggcgacatggtggatctggagccttgttgcactgccttgcctgtgctctccaatcagggtggccagtggggagccatttggcttttctcaagagcatactcaggtggaccttgctccactgtttgaccagatgaggcattctgaacagccaagcctgtgctggtctgttttcatgttgatttttttttttcttttctttttgagatggagtttttcccttgtcacccaggctggagtgcaatggtgtgatctcggctcactgcaacctccgcctcccgggttcaagtgattctcctgcctcagcctccctagtagctgggattacaggcacacaccaccatgcccagctaatttttgtgtttttagtagagacggggtttcaccgtgttggctgggctggtctcgaactcctgaactcaagtgatccaccctccttggcctcccaaagtgctgggattgcaggcgtgagccactgcgcccggcccccatgtcgatttttaaatgcacctctgcatcgttcttcagtccccatatgctcactgagcaccactgcgactggcagacgggcacagggaggcgccacgaccagtcctggccttcaaggggcttgtggtctagtgggcccaatgctaggtggcgagtgctccaaagagtgtggtgcacgccttccgcttgaccgctctccagacgccacagggaggcacctcgcagctgaccacagatttctctctgtggagcagtgtcttcagagcggctgccatgccactgctgggcgagggtctgcgggcgggtagagccaggagcacctgtgaggaagtgcactgccattttcgtagctgcttcccgtgtgtctcagttacacacggctggcatgtgtgcactgatgagacgggaacgtgatggttgcttttcagcactgaaagggatactgctcagggggcgtgtttcaggatctggttagggaagaagcagcgagagcacagatggggccctgtgtggtaacaagaaaaaagtcctggttgacaacagtgccacgaagcgttagaacacatagggatgtttgtggagcatttgcatgtggaaagcagcaaaaacataatgggaacgggttcttttgttatgatttttaaaaatctcttttgtaacatccttcccgctgcgccgtttctgcatattcctttatgtagctttcaaactcctcttaggagttctggtccctacagggcgtgggagcccaggctttacgtagctttcaaactcctcttaggagttctggtccctacagggtgtgggagcccagggcctgtgccgagcagcctgcctccacgagctagacagaggaagggctggggttttgcctttttagtctcaaaattcgtactccagttgcttaggctctgactttccccacttggaaagtccctcacggccgagggtccctcccagccctgatttcacatcggcattttccccagtattagagccaaggccctccgcgggcaggtggggcagctgtgggagctggtgccagtctctgacctgcgtccctcctcccaggatcaggaaaggctttccttgtgaagccagagtggtggccaggatcctgccccagtttctagacgacttcttcccaccccaggacatcatgaacaaagtcatcggagagtttctgtccaaccagcagccatacccccagttcatggccaccgtggtgtataaggtgaggttgcatgtgggatggggatggagtgggaaagcctggaggtggagttgcctccgacttcccagcagattcgccagcagagcccagctcctccgctttaaagcagcaatgcctctggcccccaccccacccccgccacccaggcgcagcaggtgcttcccgtccccccagccctgacactcaggcacctgcttgctccttgcaggtgtttcagactctgcacagcaccgggcagtcgtccatggtccgggactgggtcatgctgtccctctccaacttcacgcagagggccccggtcgccatggccacgtggagcctctcctgcttctttgtcagcgcgtccaccagcccgtgggtcgcggcgatgtatcctctctgggtccctggtgctggccccgtttcccttgtcaacaccgaggctcatgtttcatgataaggttttgaaacctaacctttgcaaaaaccccacagatgccagggtgacaggccctcagccccagggaagtaaaatgctgacaggggtacagaaaggagcacgtccagacatttgctgaccagggcctctcagaggggccggtgtatggcaggagggtcgcagctgaggggcctttctgtggagggcctgggtgaggggagcgagggtgggcggtggtctctgcagacgtcccgcccactcgcgggctctgtgtggctgggcttctcctgacactgcttctcattagctttggtcattgtgcctcgatcgccctctcggggaaaggcttaagtaaagatccagttcccacccccagatgctggctgccaggagtttccctttccacagcccttccccaagacagaccacaagagcctccaagcagcacagttgtcctggtgctgacagcacagccttgcccggcgtgcctggcacggctctgccctcactgcattggagcagggctagtggaggccagcggaagcaccggccaccagcgctgcacaggagccaggccaggtgagtgctgccgagtgggtgccctgcctgcagggcatccagccagccaagggttgcaggaatggaggtggaggcgctgatgcagctggaggcatccaggtggcccttccggggctctgctcgctctccaggctccctggacccctttgtagactgtttcaggagaggaactcccaggtgaggacagggaggcagcattcccctcatttgccggcctttttccttaactcctgcaccagcctcccacatgtcatcagcaggatgggcaagctggagcaggtggacgtgaaccttttctgcctggtcgccacagacttctacagacaccagatagaggaggagctcgaccgcagggccttccagtctgtgcttgaggtggttgcagccccaggaagcccatatcaccggctgctgacttgtttacgaaatgtccacaaggtcaccacctgctgagcgccatggtgggagagactgtgaggcggcagctggggccggagcctttggaagtctgcgcccttgtgccctgcctccaccgagccagcttggtccctatgggcttccgcacatgccgcgggcggccaggcaacgtgcgtgtctctgccatgtggcagaagtgctctttgtggcagtggccaggcagggagtgtctgcagtcctggtggggctgagcctgaggccttccagaaagcaggagcagctgtgctgcaccccatgtgggtgaccaggtcctttctcctgatagtcacctgctggttgttgccaggttgcagctgctcttgcatctgggccagaagtcctccctcctgcaggctggctgttggcccctctgctgtcctgcagtagaaggtgccgtgagcaggctttgggaacactggcctgggtctccctggtggggtgtgcatgccacgccccgtgtctggatgcacagatgccatggcctgtgctgggccagtggctgggggtgctagacacccggcaccattctcccttctctcttttcttctcaggatttaaaatttaattatatcagtaaagagattaattttaacgtaactctttctatgcccgtgtaaagtatgtgaatcgcaaggcctgtgctgcatgcgacagcgtccggggtggtggacagggcccccggccacgctccctctcctgtagccactggcatagccctcctgagcacccgctgacatttccgttgtacatgttcctgtttatgcattcacaaggtgactgggatgtagagaggcgttagtgggcaggtggccacagcaggactgaggacaggcccccattatcctaggggtgcgctcacctgcagcccctcctcctcgggcacagacgactgtcgttctccacccaccagtcagggacagcagcctccctgtcactcagctgagaaggccagccctccctggctgtgagcagcctccactgtgtccagagacatgggcctcccactcctgttccttgctagccctggggtggcgtctgcctaggagctggctggcaggtgttgggacctgctgctccatggatgcatgccctaagagtgtcactgagctgtgttttgtctgagcctctctcggtcaacagcaaagcttggtgtcttggcactgttagtgacagagcccagcatcccttctgcccccgttccagctgacatcttgcacggtgaccccttttagtcaggagagtgcagatctgtgctcatcggagactgccccacggccctgtcagagccgccactcctatccccaggccaggtccctggaccagcctcctgtttgcaggcccagaggagccaagtcattaaaatggaagtggattctggatggccgggctgctgctgatgtaggagctggatttgggagctctgcttgccgactggctgtgagacgaggcaggggctctgcttcctcagccctagaggcgagccaggcaaggttggcgactgtcatgtggcttggtttggtcatgcccgtcgatgttttgggtattgaatgtggtaagtggaggaaatgttggaactctgtgcaggtgctgccttgagacccccaagcttccacctgtccctctcctatgtggcagctggggagcagctgagatgtggacttgtatgctgcccacatacgtgagggggagctgaaagggagcccctcctctgagcagcctctgccaggcctgtatgaggcttttcccaccagctcccaacagaggcctcccccagccaggaccacctcgtcctcgtggcggggcagcaggagcggtagaaaggggtccgatgtttgaggaggcccttaagggaagctactgaattataacacgtaagaaaatcaccattccgtattggttgggggctcctgtttctcatcctagctttttcctggaaagcccgctagaaggtttgggaacgaggggaaagttctcagaactgttggctgctccccacccgcctcccgcctcccccgcaggttatgtcagcagctctgagacagcagtatcacaggccagatgttgttcctggctagatgtttacatttgtaagaaataacactgtgaatgtaaaacagagccattcccttggaatgcatatcgctgggctcaacatagagtttgtcttcctcttgtttacgacgtgatctaaaccagtccttagcaaggggctcagaacaccccgctctggcagtaggtgtcccccacccccaaagacctgcctgtgtgctccggagatgaatatgagctcattagtaaaaatgacttcacccacgcatatacataaagtatccatgcatgtgcatatagacacatctataattttacacacacacctctcaagacggagatgcatggcctctaagagtgcccgtgtcggttcttcctggaagttgactttccttagacccgccaggtcaagttagccgcgtgacggacatccaggcgtgggacgtggtcagggcagggctcattcattgcccactaggatcccactggcgaagatggtctccatatcagctctctgcagaagggaggaagactttatcatgttcctaaaaatctgtggcaagcacccatcgtattatccaaattttgttgcaaatgtgattaatttggttgtcaagttttgggggtgggctgtggggagattgcttttgttttcctgctggtaatatcgggaaagattttaatgaaaccagggtagaattgtttggcaatgcactgaagcgtgtttctttcccaaaatgtgcctcccttccgctgcgggcccagctgagtctatgtaggtgatgtttccagctgccaagtgctctttgttactgtccaccctcatttctgccagcgcatgtgtcctttcaaggggaaaatgtgaagctgaaccccctccagacacccagaatgtagcatctgagaaggccctgtgccctaaaggacacccctcgcccccatcttcatggagggggtcatttcagagccctcggagccaatgaacagctcctcctcttggagctgagatgagccccacgtggagctcgggacggatagtagacagcaataactcggtgtgtggccgcctggcaggtggaacttcctcccgttgcggggtggagtgaggttagttctgtgtgtctggtgggtggagtcaggcttctcttgctacctgtgagcatccttcccagcagacatcctcatcgggctttgtccctcccccgcttcctccctctgcggggaggacccgggaccacagctgctggccagggtagacttggagctgtcctccagaggggtcacgtgtaggagtgagaagaaggaagatcttgagagctgctgagggaccttggagagctcaggatggctcagacgaggacactcgcttgccgggcctgggcctcctgggaaggagggagctgctcagaatgccgcatgacaactgaaggcaacctggaaggttcaggggccgctcttcccccatgtgcctgtcacgctctggtgcagtcaaaggaacgccttcccctcagttgtttctaagagcagagtctcccgctgcaatctgggtggtaactgccagccttggaggatcgtggccaacgtggacctgcctacggagggtgggctctgacccaagtggggcctccttgtccaggtctcactgctttgcaccgtggtcagagggactgtcagctgagcttgagctcccctggagccagcagggctgtgatgggcgagtcccggagccccacccagacctgaatgcttctgagagcaaagggaaggactgacgagagatgtatatttaattttttaactgctgcaaacattgtacatccaaattaaaggaaaaaaatggaaaccatcagttgttgctgtgtgaggcttgctttgcttcatgagaacctagaccttgctgagctggagtcttaggaagcagtctcctaagtgcttctccagcaggggcagaaactgtcccaccagctaacatctggcattatggagggtcccccaggcagctgccagcagggacaggccccgtgttttctgtagccagggatgaggaagtggccccagggcatgggcctggctgggtgcttctgcaagggccttcccaaaccacagtacaggtggtcttcctgccctgcagatgggagctgtgggagctgctggagctgctggagccttcatggtcaagtgacatcataagcttatatgacatacacaagcctcaggacttggcccatggcactgaagcaggtcatcaggcccagcacagagactagagctgtgttctcacagggcccaccacccttccacctccttggccattgacacctgcgtccctggcccagctgctcccaggtaacccccaaagcagctggcacatcccacctctggtgtggccggggctgctgtgtgtccgcagggcctgccccgtctattctagcttgtttgtcctgtctgaaccagcgcctactccaagaagcctctgctcagcccagcggggatgcttctaagctccggacgagcctctcggaagccttggtgattggtggtgtagtcatcttgggatgcagatgtcttaccaacctgcaagaacaaaaaccctgtggcttcctctggtgcagggtatttagtcaatgtttgctgaggtcccgtctggttctggctaattggcaggggtcgtccacccattctttccctgctctgctgtctgtgccaggagagacgggggccagtcggccaaggggccagctcctgctgcctgctcctcttgggcacgtgcgggggccccctttctctgagcagggatagggatcagtctgccggagggatgtggtggacaggcctaaagcatttggggcggggcatgccacttgagctccctaaatctgtctcctcataggtgacaccgctccagggccccccagtggcctctcctttcagagctacctaaattctggtcacttcagagaaatggagcacccccttctccctggtccaggtgtggacagcctggcacactgagcacacctggcatggctggtaatttcagaaagaagaggggccggggtccagtgggaagcagcggtgaacccctcgtgagtgggctttgcagtccctccccatgccacggcagagctgccctcaacacagccttcctcttcctcatcggagagcacaccctgtccccttgccgagctgtgccctgtgccttcggtggtatttgattttggctgctactggctttgttgggatctggaagtcgcttcccctgcgtggtgcgtggagcactgtaagtcagatgagggaagtagccagggtgaggtgagtaccgggtggagccgccactgaagggactgggtaggggggccttgcctctacatgatgtgacacagccaaccgaggacagaggaagccccgttcctgggggtgtggggtgcacccctcagggaagcctgcagtggggcctgaggaaaggcatcctccgcgagcccacgagtctggtccatgagcaccgtgacagtgtctgtgggtagaggtggacccggccttgtgtcatcaccaggacctcttttgggaaaccatgtggacatcgcttgcgggtcccccaggctctgcagccccagcagcctggctgccttttgggcaagtggcttgagccacagaggacccagtcctgttgcagccacatcctctgggggggcccgccagtgtggccggctttctccaccctacaccaggcctccaggtgtcctggtcgggggtgtctgggccctgggtgggccctgtggacctgtgaggtcagggtcagggcatcactggaggcagagggctgaagttgtgggtctgggttccccttgtgtgcacaggcccctgccctccatgcttggtcaggcagctacccccaaaactgctaggacaggctggtcctgaggtggatcctggcccctgtaccctctggacagcccacccgcccaaccttctaccctgccccagcggcggcagtgttggccacatccttcccctcctggccccaattgctctggggaagtccaggctccggagcctgcccaggggccccccgtgatttgggcccaggactccacgtggttctctgccttcacccaagccctgaactcctcagctgccaaatccccacccatctgcacaggctgtgctcaccactgctgctcctggaaggtgcccctcagtgggacgcccacctcctctctgggcttctgtgtttgggagccctgctgcccccacccttggtcagtccccatgtcctgctggcctgtcaggcagggcagaaaatccacccagaaatgctgagcaggatgagagtctagttgggcccagcctcattatttagaagggatggaggcctagggagcatgcttctagcctgagcccagcagggccccgcccatgtcccaggtctgcaccagggacagctcctgccgaggcctgacctgccccttctccctcaggtgctgctggttgaccagcctctggccctaggagaccccgtagcgactgagggtcccagcaggccatgcagctttgccaaggtacgagcccctccccagcaggggacagatgtggggaccctcccaggcaggagcagctgggtgcctggtgctgccatctgctgcctgcctggttcttgtcctcacattggaggtcagtgtgagggctctgcctcgggaaaggccatggagcttgccctgtccagggcctcccatgtgcactgagcctgggaagagagggttggagttgagccttttaccctgggaatgctgcctggaggatggtgcgggtgtggggtggcaccctgccaggcagggccctgcctccctgcgcccactggaactcgggcaggcaggggtgtaggtgcctcc

SEQ ID NO: 115 - DNA, 13498 bp, Homo sapiens
gctgccgggacgggtccaagatggacggccgctcaggttctgcttttacctgcggcccagagccccattcattgccccggtgctgagcggcgccgcgagtcggcccgaggcctccggggactgccgtgccgggcgggagaccgccatggcgaccctggaaaagctgatgaaggccttcgagtccctcaagtccttccagcagcagcagcagcagcagcagcagcagcagcagcagcagcagcagcagcagcagcagcagcaacagccgccaccgccgccgccgccgccgccgcctcctcagcttcctcagccgccgccgcaggcacagccgctgctgcctcagccgcagccgcccccgccgccgcccccgccgccacccggcccggctgtggctgaggagccgctgcaccgaccaaagaaagaactttcagctaccaagaaagaccgtgtgaatcattgtctgacaatatgtgaaaacatagtggcacagtctgtcagaaattctccagaatttcagaaacttctgggcatcgctatggaactttttctgctgtgcagtgatgacgcagagtcagatgtcaggatggtggctgacgaatgcctcaacaaagttatcaaagctttgatggattctaatcttccaaggttacagctcgagctctataaggaaattaaaaagaatggtgcccctcggagtttgcgtgctgccctgtggaggtttgctgagctggctcacctggttcggcctcagaaatgcaggccttacctggtgaaccttctgccgtgcctgactcgaacaagcaagagacccgaagaatcagtccaggagaccttggctgcagctgttcccaaaattatggcttcttttggcaattttgcaaatgacaatgaaattaaggttttgttaaaggccttcatagcgaacctgaagtcaagctcccccaccattcggcggacagcggctggatcagcagtgagcatctgccagcactcaagaaggacacaatatttctatagttggctactaaatgtgctcttaggcttactcgttcctgtcgaggatgaacactccactctgctgattcttggcgtgctgctcaccctgaggtatttggtgcccttgctgcagcagcaggtcaaggacacaagcctgaaaggcagcttcggagtgacaaggaaagaaatggaagtctctccttctgcagagcagcttgtccaggtttatgaactgacgttacatcatacacagcaccaagaccacaatgttgtgaccggagccctggagctgttgcagcagctcttcagaacgcctccacccgagcttctgcaaaccctgaccgcagtcgggggcattgggcagctcaccgctgctaaggaggagtctggtggccgaagccgtagtgggagtattgtggaacttatagctggagggggttcctcatgcagccctgtcctttcaagaaaacaaaaaggcaaagtgctcttaggagaagaagaagccttggaggatgactctgaatcgagatcggatgtcagcagctctgccttaacagcctcagtgaaggatgagatcagtggagagctggctgcttcttcaggggtttccactccagggtcagcaggtcatgacatcatcacagaacagccacggtcacagcacacactgcaggcggactcagtggatctggccagctgtgacttgacaagctctgccactgatggggatgaggaggatatcttgagccacagctccagccaggtcagcgccgtcccatctgaccctgccatggacctgaatgatgggacccaggcctcgtcgcccatcagcgacagctcccagaccaccaccgaagggcctgattcagctgttaccccttcagacagttctgaaattgtgttagacggtaccgacaaccagtatttgggcctgcagattggacagccccaggatgaagatgaggaagccacaggtattcttcctgatgaagcctcggaggccttcaggaactcttccatggcccttcaacaggcacatttattgaaaaacatgagtcactgcaggcagccttctgacagcagtgttgataaatttgtgttgagagatgaagctactgaaccgggtgatcaagaaaacaagccttgccgcatcaaaggtgacattggacagtccactgatgatgactctgcacctcttgtccattgtgtccgccttttatctgcttcgtttttgctaacagggggaaaaaatgtgctggttccggacagggatgtgagggtcagcgtgaaggccctggccctcagctgtgtgggagcagctgtggccctccacccggaatctttcttcagcaaactctataaagttcctcttgacaccacggaataccctgaggaacagtatgtctcagacatcttgaactacatcgatcatggagacccacaggttcgaggagccactgccattctctgtgggaccctcatctgctccatcctcagcaggtcccgcttccacgtgggagattggatgggcaccattagaaccctcacaggaaatacattttctttggcggattgcattcctttgctgcggaaaacactgaaggatgagtcttctgttacttgcaagttagcttgtacagctgtgaggaactgtgtcatgagtctctgcagcagcagctacagtgagttaggactgcagctgatcatcgatgtgctgactctgaggaacagttcctattggctggtgaggacagagcttctggaaacccttgcagagattgacttcaggctggtgagctttttggaggcaaaagcagaaaacttacacagaggggctcatcattatacagggcttttaaaactgcaagaacgagtgctcaataatgttgtcatccatttgcttggagatgaagaccccagggtgcgacatgttgccgcagcatcactaattaggcttgtcccaaagctgttttataaatgtgaccaaggacaagctgatccagtagtggccgtggcaagagatcaaagcagtgtttacctgaaacttctcatgcatgagacgcagcctccatctcatttctccgtcagcacaataaccagaatatatagaggctataacctactaccaagcataacagacgtcactatggaaaataacctttcaagagttattgcagcagtttctcatgaactaatcacatcaaccaccagagcactcacatttggatgctgtgaagctttgtgtcttctttccactgccttcccagtttgcatttggagtttaggttggcactgtggagtgcctccactgagtgcctcagatgagtctaggaagagctgtaccgttgggatggccacaatgattctgaccctgctctcgtcagcttggttcccattggatctctcagcccatcaagatgctttgattttggccggaaacttgcttgcagccagtgctcccaaatctctgagaagttcatgggcctctgaagaagaagccaacccagcagccaccaagcaagaggaggtctggccagccctgggggaccgggccctggtgcccatggtggagcagctcttctctcacctgctgaaggtgattaacatttgtgcccacgtcctggatgacgtggctcctggacccgcaataaaggcagccttgccttctctaacaaaccccccttctctaagtcccatccgacgaaaggggaaggagaaagaaccaggagaacaagcatctgtaccgttgagtcccaagaaaggcagtgaggccagtgcagcttctagacaatctgatacctcaggtcctgttacaacaagtaaatcctcatcactggggagtttctatcatcttccttcatacctcaaactgcatgatgtcctgaaagctacacacgctaactacaaggtcacgctggatcttcagaacagcacggaaaagtttggagggtttctccgctcagccttggatgttctttctcagatactagagctggccacactgcaggacattgggaagtgtgttgaagagatcctaggatacctgaaatcctgctttagtcgagaaccaatgatggcaactgtttgtgttcaacaattgttgaagactctctttggcacaaacttggcctcccagtttgatggcttatcttccaaccccagcaagtcacaaggccgagcacagcgccttggctcctccagtgtgaggccaggcttgtaccactactgcttcatggccccgtacacccacttcacccaggccctcgctgacgccagcctgaggaacatggtgcaggcggagcaggagaacgacacctcgggatggtttgatgtcctccagaaagtgtctacccagttgaagacaaacctcacgagtgtcacaaagaaccgtgcagataagaatgctattcataatcacattcgtttgtttgaacctcttgttataaaagctttaaaacagtacacgactacaacatgtgtgcagttacagaagcaggttttagatttgctggcgcagctggttcagttacgggttaattactgtcttctggattcagatcaggtgtttattggctttgtattgaaacagtttgaatacattgaagtgggccagttcagggaatcagaggcaatcattccaaacatctttttcttcttggtattactatcttatgaacgctatcattcaaaacagatcattggaattcctaaaatcattcagctctgtgatggcatcatggccagtggaaggaaggctgtgacacatgccataccggctctgcagcccatagtccacgacctctttgtattaagaggaacaaataaagctgatgcaggaaaagagcttgaaacccaaaaagaggtggtggtgtcaatgttactgagactcatccagtaccatcaggtgttggagatgttcattcttgtcctgcagcagtgccacaaggagaatgaagacaagtggaagcgactgtctcgacagatagctgacatcatcctcccaatgttagccaaacagcagatgcacattgactctcatgaagcccttggagtgttaaatacattatttgagattttggccccttcctccctccgtccggtagacatgcttttacggagtatgttcgtcactccaaacacaatggcgtccgtgagcactgttcaactgtggatatcgggaattctggccattttgagggttctgatttcccagtcaactgaagatattgttctttctcgtattcaggagctctccttctctccgtatttaatctcctgtacagtaattaataggttaagagatggggacagtacttcaacgctagaagaacacagtgaagggaaacaaataaagaatttgccagaagaaacattttcaaggtttctattacaactggttggtattcttttagaagacattgttacaaaacagctgaaggtggaaatgagtgagcagcaacatactttctattgccaggaactaggcacactgctaatgtgtctgatccacatcttcaagtctggaatgttccggagaatcacagcagctgccactaggctgttccgcagtgatggctgtggcggcagtttctacaccctggacagcttgaacttgcgggctcgttccatgatcaccacccacccggccctggtgctgctctggtgtcagatactgctgcttgtcaaccacaccgactaccgctggtgggcagaagtgcagcagaccccgaaaagacacagtctgtccagcacaaagttacttagtccccagatgtctggagaagaggaggattctgacttggcagccaaacttggaatgtgcaatagagaaatagtacgaagaggggctctcattctcttctgtgattatgtctgtcagaacctccatgactccgagcacttaacgtggctcattgtaaatcacattcaagatctgatcagcctttcccacgagcctccagtacaggacttcatcagtgccgttcatcggaactctgctgccagcggcctgttcatccaggcaattcagtctcgttgtgaaaacctttcaactccaaccatgctgaagaaaactcttcagtgcttggaggggatccatctcagccagtcgggagctgtgctcacgctgtatgtggacaggcttctgtgcacccctttccgtgtgctggctcgcatggtcgacatccttgcttgtcgccgggtagaaatgcttctggctgcaaatttacagagcagcatggcccagttgccaatggaagaactcaacagaatccaggaataccttcagagcagcgggctcgctcagagacaccaaaggctctattccctgctggacaggtttcgtctctccaccatgcaagactcacttagtccctctcctccagtctcttcccacccgctggacggggatgggcacgtgtcactggaaacagtgagtccggacaaagactggtacgttcatcttgtcaaatcccagtgttggaccaggtcagattctgcactgctggaaggtgcagagctggtgaatcggattcctgctgaagatatgaatgccttcatgatgaactcggagttcaacctaagcctgctagctccatgcttaagcctagggatgagtgaaatttctggtggccagaagagtgccctttttgaagcagcccgtgaggtgactctggcccgtgtgagcggcaccgtgcagcagctccctgctgtccatcatgtcttccagcccgagctgcctgcagagccggcggcctactggagcaagttgaatgatctgtttggggatgctgcactgtatcagtccctgcccactctggcccgggccctggcacagtacctggtggtggtctccaaactgcccagtcatttgcaccttcctcctgagaaagagaaggacattgtgaaattcgtggtggcaacccttgaggccctgtcctggcatttgatccatgagcagatcccgctgagtctggatctccaggcagggctggactgctgctgcctggccctgcagctgcctggcctctggagcgtggtctcctccacagagtttgtgacccacgcctgctccctcatctactgtgtgcacttcatcctggaggccgttgcagtgcagcctggagagcagcttcttagtccagaaagaaggacaaataccccaaaagccatcagcgaggaggaggaggaagtagatccaaacacacagaatcctaagtatatcactgcagcctgtgagatggtggcagaaatggtggagtctctgcagtcggtgttggccttgggtcataaaaggaatagcggcgtgccggcgtttctcacgccattgctaaggaacatcatcatcagcctggcccgcctgccccttgtcaacagctacacacgtgtgcccccactggtgtggaagcttggatggtcacccaaaccgggaggggattttggcacagcattccctgagatccccgtggagttcctccaggaaaaggaagtctttaaggagttcatctaccgcatcaacacactaggctggaccagtcgtactcagtttgaagaaacttgggccaccctccttggtgtcctggtgacgcagcccctcgtgatggagcaggaggagagcccaccagaagaagacacagagaggacccagatcaacgtcctggccgtgcaggccatcacctcactggtgctcagtgcaatgactgtgcctgtggccggcaacccagctgtaagctgcttggagcagcagccccggaacaagcctctgaaagctctcgacaccaggtttgggaggaagctgagcattatcagagggattgtggagcaagagattcaagcaatggtttcaaagagagagaatattgccacccatcatttatatcaggcatgggatcctgtcccttctctgtctccggctactacaggtgccctcatcagccacgagaagctgctgctacagatcaaccccgagcgggagctggggagcatgagctacaaactcggccaggtgtccatacactccgtgtggctggggaacagcatcacacccctgagggaggaggaatgggacgaggaagaggaggaggaggccgacgcccctgcaccttcgtcaccacccacgtctccagtcaactccaggaaacaccgggctggagttgacatccactcctgttcgcagtttttgcttgagttgtacagccgctggatcctgccgtccagctcagccaggaggaccccggccatcctgatcagtgaggtggtcagatcccttctagtggtctcagacttgttcaccgagcgcaaccagtttgagctgatgtatgtgacgctgacagaactgcgaagggtgcacccttcagaagacgagatcctcgctcagtacctggtgcctgccacctgcaaggcagctgccgtccttgggatggacaaggccgtggcggagcctgtcagccgcctgctggagagcacgctcaggagcagccacctgcccagcagggttggagccctgcacggcgtcctctatgtgctggagtgcgacctgctggacgacactgccaagcagctcatcccggtcatcagcgactatctcctctccaacctgaaagggatcgcccactgcgtgaacattcacagccagcagcacgtactggtcatgtgtgccactgcgttttacctcattgagaactatcctctggacgtagggccggaattttcagcatcaataatacagatgtgtggggtgatgctgtctggaagtgaggagtccaccccctccatcatttaccactgtgccctcagaggcctggagcgcctcctgctctctgagcagctctcccgcctggatgcagaatcgctggtcaagctgagtgtggacagagtgaacgtgcacagcccgcaccgggccatggcggctctgggcctgatgctcacctgcatgtacacaggaaaggagaaagtcagtccgggtagaacttcagaccctaatcctgcagcccccgacagcgagtcagtgattgttgctatggagcgggtatctgttctttttgataggatcaggaaaggctttccttgtgaagccagagtggtggccaggatcctgccccagtttctagacgacttcttcccaccccaggacatcatgaacaaagtcatcggagagtttctgtccaaccagcagccatacccccagttcatggccaccgtggtgtataaggtgtttcagactctgcacagcaccgggcagtcgtccatggtccgggactgggtcatgctgtccctctccaacttcacgcagagggccccggtcgccatggccacgtggagcctctcctgcttctttgtcagcgcgtccaccagcccgtgggtcgcggcgatcctcccacatgtcatcagcaggatgggcaagctggagcaggtggacgtgaaccttttctgcctggtcgccacagacttctacagacaccagatagaggaggagctcgaccgcagggccttccagtctgtgcttgaggtggttgcagccccaggaagcccatatcaccggctgctgacttgtttacgaaatgtccacaaggtcaccacctgctgagcgccatggtgggagagactgtgaggcggcagctggggccggagcctttggaagtctgcgcccttgtgccctgcctccaccgagccagcttggtccctatgggcttccgcacatgccgcgggcggccaggcaacgtgcgtgtctctgccatgtggcagaagtgctctttgtggcagtggccaggcagggagtgtctgcagtcctggtggggctgagcctgaggccttccagaaagcaggagcagctgtgctgcaccccatgtgggtgaccaggtcctttctcctgatagtcacctgctggttgttgccaggttgcagctgctcttgcatctgggccagaagtcctccctcctgcaggctggctgttggcccctctgctgtcctgcagtagaaggtgccgtgagcaggctttgggaacactggcctgggtctccctggtggggtgtgcatgccacgccccgtgtctggatgcacagatgccatggcctgtgctgggccagtggctgggggtgctagacacccggcaccattctcccttctctcttttcttctcaggatttaaaatttaattatatcagtaaagagattaattttaacgtaactctttctatgcccgtgtaaagtatgtgaatcgcaaggcctgtgctgcatgcgacagcgtccggggtggtggacagggcccccggccacgctccctctcctgtagccactggcatagccctcctgagcacccgctgacatttccgttgtacatgttcctgtttatgcattcacaaggtgactgggatgtagagaggcgttagtgggcaggtggccacagcaggactgaggacaggcccccattatcctaggggtgcgctcacctgcagcccctcctcctcgggcacagacgactgtcgttctccacccaccagtcagggacagcagcctccctgtcactcagctgagaaggccagccctccctggctgtgagcagcctccactgtgtccagagacatgggcctcccactcctgttccttgctagccctggggtggcgtctgcctaggagctggctggcaggtgttgggacctgctgctccatggatgcatgccctaagagtgtcactgagctgtgttttgtctgagcctctctcggtcaacagcaaagcttggtgtcttggcactgttagtgacagagcccagcatcccttctgcccccgttccagctgacatcttgcacggtgaccccttttagtcaggagagtgcagatctgtgctcatcggagactgccccacggccctgtcagagccgccactcctatccccaggccaggtccctggaccagcctcctgtttgcaggcccagaggagccaagtcattaaaatggaagtggattctggatggccgggctgctgctgatgtaggagctggatttgggagctctgcttgccgactggctgtgagacgaggcaggggctctgcttcctcagccctagaggcgagccaggcaaggttggcgactgtcatgtggcttggtttggtcatgcccgtcgatgttttgggtattgaatgtggtaagtggaggaaatgttggaactctgtgcaggtgctgccttgagacccccaagcttccacctgtccctctcctatgtggcagctggggagcagctgagatgtggacttgtatgctgcccacatacgtgagggggagctgaaagggagcccctcctctgagcagcctctgccaggcctgtatgaggcttttcccaccagctcccaacagaggcctcccccagccaggaccacctcgtcctcgtggcggggcagcaggagcggtagaaaggggtccgatgtttgaggaggcccttaagggaagctactgaattataacacgtaagaaaatcaccattccgtattggttgggggctcctgtttctcatcctagctttttcctggaaagcccgctagaaggtttgggaacgaggggaaagttctcagaactgttggctgctccccacccgcctcccgcctcccccgcaggttatgtcagcagctctgagacagcagtatcacaggccagatgttgttcctggctagatgtttacatttgtaagaaataacactgtgaatgtaaaacagagccattcccttggaatgcatatcgctgggctcaacatagagtttgtcttcctcttgtttacgacgtgatctaaaccagtccttagcaaggggctcagaacaccccgctctggcagtaggtgtcccccacccccaaagacctgcctgtgtgctccggagatgaatatgagctcattagtaaaaatgacttcacccacgcatatacataaagtatccatgcatgtgcatatagacacatctataattttacacacacacctctcaagacggagatgcatggcctctaagagtgcccgtgtcggttcttcctggaagttgactttccttagacccgccaggtcaagttagccgcgtgacggacatccaggcgtgggacgtggtcagggcagggctcattcattgcccactaggatcccactggcgaagatggtctccatatcagctctctgcagaagggaggaagactttatcatgttcctaaaaatctgtggcaagcacccatcgtattatccaaattttgttgcaaatgtgattaatttggttgtcaagttttgggggtgggctgtggggagattgcttttgttttcctgctggtaatatcgggaaagattttaatgaaaccagggtagaattgtttggcaatgcactgaagcgtgtttctttcccaaaatgtgcctcccttccgctgcgggcccagctgagtctatgtaggtgatgtttccagctgccaagtgctctttgttactgtccaccctcatttctgccagcgcatgtgtcctttcaaggggaaaatgtgaagctgaaccccctccagacacccagaatgtagcatctgagaaggccctgtgccctaaaggacacccctcgcccccatcttcatggagggggtcatttcagagccctcggagccaatgaacagctcctcctcttggagctgagatgagccccacgtggagctcgggacggatagtagacagcaataactcggtgtgtggccgcctggcaggtggaacttcctcccgttgcggggtggagtgaggttagttctgtgtgtctggtgggtggagtcaggcttctcttgctacctgtgagcatccttcccagcagacatcctcatcgggctttgtccctcccccgcttcctccctctgcggggaggacccgggaccacagctgctggccagggtagacttggagctgtcctccagaggggtcacgtgtaggagtgagaagaaggaagatcttgagagctgctgagggaccttggagagctcaggatggctcagacgaggacactcgcttgccgggcctgggcctcctgggaaggagggagctgctcagaatgccgcatgacaactgaaggcaacctggaaggttcaggggccgctcttcccccatgtgcctgtcacgctctggtgcagtcaaaggaacgccttcccctcagttgtttctaagagcagagtctcccgctgcaatctgggtggtaactgccagccttggaggatcgtggccaacgtggacctgcctacggagggtgggctctgacccaagtggggcctccttgtccaggtctcactgctttgcaccgtggtcagagggactgtcagctgagcttgagctcccctggagccagcagggctgtgatgggcgagtcccggagccccacccagacctgaatgcttctgagagcaaagggaaggactgacgagagatgtatatttaattttttaactgctgcaaacattgtacatccaaattaaaggaaaaaaatggaaaccatcaaaaaaaaaaaaaaaaaa

SEQ ID NO: 116 - DNA, 19859 bp, Homo sapiens
gaaagggccttgacatcagttcctttgtgtgtactcactgaagcctgcgttggtccagagcggaggctgtgtgcctgggggagttttcctctatacatctctccccaaccctaggttccctgttcttcctccagctgcaccagagcaacctctcactccccatgccacgttccacagttgccaccacctctgtggcattgaaatgagcacctccattaaagtctgaatcagtgcactgttgtgtctaaggagtcttactctagtccctatgaggggagagaagatggagcacctggaagctggtgaaactggatagcagagctgggggggcacaaaaagaggaagacaaactgaacaaatatggccgagatgatggcactgcctaccccattctggctaggtggggtgcatgtggcccctgctttcttagcagaaggcttggctcccagacgcaggtgaattaaggggttcaagagcccctaaaagcataaaatattttgtgtgtgtgtgtgtgtgcacgcgcattttgggggaaagggggtctaaggtgttttcatatccaaagggcttgtggactggagcagctcctgtactgggcctctgccaacaaaaccctggctggttctcgaatggaacaggacttcatggccatcacccactgcaagatggggaaatgggaaggaagaatggttccgggggtagtatacggaaggacctaaggaaacagagtcctcaataaactgaagattcaggaacaaaagtgcttaacagaaccctggctgggtcagactaacagtaggtttccaatatgtggctagagacgtactactccttagctataactcgttaactcttatggggcctcagcgttgagatgctcattctaggtacccccgagggggacaaatcccttcctagtggctcggatgcaaggttgcgtcccacagatagggtttgcacatgggagatctaaccactagagggagtcagagttttgcaggacgccatactggacgccaagtgggaggaacttcaaggctgtcccctgcgggcctcccgctctgcttctgcgaaggtctggtcctggctccctctgccatcctgcccagctccaaggctaaaataggttctagttctgtatgggtagggcccatttcttttcttgccctccttcccgggtccctgacacctcagccattttcagttcaaagagcctcatgccccctttccatttctgtgccttttagtttcagtgtgggcatctcatctttcccttttctcctggcgaccctttatgcctcccttggggtttcctgtactttcctctgtgcctctcagttttctctggggtccctgatacccatcttaccttagtaactcccagactgaccaggactatcctagtttgagcctagttcctagcctctgtcctttctttcatccctcctcaccaggtcgccttctctgacagtctggccccccaacccccaaagtatcggggttggattgggttacagctagctctgcctgggcctcccaggcccttctctccactttccctttgtgccgttgcctggagaccaatgggttgtggggggctgagccagagagggagctggggtgagggatggctggggctgtgtgtgtgcgtgtgcgtgtgtgtgtgtgtgtgtgtgtgtgagagagagagagagagatgtcccctgcagctggactataagcctggccctcaggtaggggaggaatgggagagggtagacaatggtttcttttgtgactctcaccatcccctatccccacatatgcctaaatttttcttttagtatccattgtagcccattccttagtgattaaaaaacaagggagaagagctcagcctggaagggatttggaaagggcttgagccaaggcccagtgggagactgaactgagtggtacagaaagagaggaaatgccatggggagagagggtgagagggaaagggggagccctggaacaaagtcaggggtggggaggagcagcagctaccctagagcaagaggaagggagtcggggtgcacagggagacagggagctggcctggtctcagggaggccctgggaggaaggtgtgcttggagtggtaaagtgagtgccaaccaattcaagggacttcagagtgatgactcattcccaggccaaggaagtgttcctgttcctgcgcccagttccccagtgctctggaatcttgtttagagcttttgagtattcccagaactttgttgaatctggcccaaggaattgtgagacaaaaatctactgagctgctccagagctaacctccttccttccctgaaggcaggtgggatcttgccaattcagggcccacccttagcctccagcaagactggccccacaagtacccgacccccaccccaaatctggagctctactgagggctcctaatccacactccagctccagctcttccggcttgccagcctgcctccctcccattctctggccttcccaatttctgctgccaaaaatcaccctgtgtcctttgtcctgggagatgttgccgcttggtggagggccaggagggagcccaggagaaggaactggtggtgggctggcggaggtgctggcttcacggccgggagcagactgactgccagaggctacctggagagcaggggagggagaggaagggttgggaggagcctgcagtctgtggtggggactgtctccaccttagaacaagtgggattgagcaacaaggatacccagggatttgggtccacattaagcccagtcttcacccgactgcttccctgtgacccaggggatctttagtgatgactttcaacagatttgagaaggaaaatggagatgccactagatggaaggcctgaggatggtgtctcactcctccaagctgtatcccttacctatctacccatgagcttgccagcaacctccccccgctcccacatctgtcatttcctttaactgccctcgtttcccatctccattttttctttttttttttgagacggcgtctcgctctgtctcccaggctggagtgcagtggcgcgatctctgcttgctgaaacctttgcctcccaggttcaaggattctcctgcctcagcctctgagtagctgggattacaggcatgcgccaccacacccggctaatttttgtatttttagtagagacggggtttcgccatgttggccaggctggtcttgaactcctgacaagtgacccacccgactcagcctccgaaagtgctgagattacaggcgtgagcccccgcaccggccccatctccattttcttttcccatccatgatctttcctcttccatactgccgccagccataggccttgttcagcttacatttccttccaatcttcttatccccctcttccccattctgcccgcccaagtaaaccctcctcggctctactgggagcccccacccccaggatccagccagcccggtgtctcccacccttctttcccatccagagccctcctttctcacccagaacctattttccctagaattggcacctgggcccacctcgttcatcccttcttaaggttcctcacgcgttccctcctctctctcctcactgacgtttcctctggacttctctctctccagcattccttcatccccccacccccaattcttatatttatgactcttttgtcaacactaatcacccccaaaagctttactttttccagaagccccatctttctatatatgtcatcttttcaatttttctctctccttatgaccccaaacttccatcccattctctctgataatagcccccaaacccgtctggctccatctctgccacagatccctcaccccaagcttctctcacttctcaccaggcacccacaaagcccccaggcagctccatctttccaatccaatcccattatcccaatctctaccccaggatcccccaaactcctcccacttcacctctgccacagacccgctcgcccccaaacttcagcctcccctcatctgccctcaccacccacagcccctcctacctagccctctcccgcgccgggcccgcgggctccccacattccgccacggctagccctccccgcgccccggccccctcggcctcggcctcggccaactcgcgctgcgcctccccctctccggctccccctctctcccccctcgcggcttgcctcgcgctccctccctcgcgtctccctcctggcccctctctcctccgttcctccgcgctccctccttctccctcttcctcccttctcccatccccctctcccaggctccctcccttcgccgtccgctttcctgtgcgagtcgccggacgcaccgcccagcccgtccgcagccccgcgccgggtcggggcctcgggccgggccatttcggagggaccgcggcttcggggaggggctaggaggggggagagggagccgactgccggggaaggggcgggggccgcgggcgaggcggccgaggggcccgggatcgcgcgggtgcgggctgcgctaggcgggcgcgggcggcggcgggtcggaaccgcgccgagggccgggcgggccgcggggccgggcggcgcggcgggggcgggcggcgcggcccggggcattccgggcggccagggggaggcggcgagcccggggaggtggggagcagagcggggatcggggtttgctccgggggccggcgggcgattggggccaggcggggaaaaggggggatgggggccgccctccgggggggtcggggccgccgccgccgtcgtcgcggcggcgactgaggccgagaagaggagaggggggcgggggagctgccgccgccgccccccagaggcgccggagcccggaatcccgctcggagccagccagccgtcccgagctaccagcaggtaaggtctgcggccgcctgggccccgggcccgcggggttctgtcccgcccgggctccggcctgcggctccccacccccacccctcccagttccccctcctgccgccgccgcctccatttgttattttcccaatcccgtccccccactgcgggctctgcctggcctgagggccgggggctcagggggtggggcccgccgaggagagtcgggggccagggtttcgggaggatcgggaaggtggggaaggagggagggtctccggaggaggcctgtggggccagagggtatccgggacccgcagactcaaaagaggaggaacatcgaggccggggttggcggaggaaaacgggggatgctgtgagtggggttccgggcgaaggcagaatggataggagagatggcagcgaggtggggcatgaagcctccaggaaaaagctccaaaggaccagaacacgggttccggagcctggggttgggggctttaggaatagacgggaagtgggaaacgggaaaggggtgtggtaggtggaaagagggattgtggctgatgaacctgggggagacggaggcttgggcaaagagaggtccatttttgagaagagccggaggttttccagcgtggaagagggaaggccatgtctttgtgacggttttcattcccctactgcaggtcacctctgaccctgttttccctatcccagacatagttatttcttggagagggcactggggcccagtagtgtgggttatcccaaaactagtgaggaggaaaacaggaacacagaagggggagttgggaagaaaggggttctgggaggatggaaatggagaattgagcaaccttacaggcactccaggcaagttgcgacctccaccctccaccctccaatttccggagcgtccgctgcccctggagctgtgatctatatagggaggccttagttactgctttgagctcaaagatctccctttgtgcatgggcttattttgactagggtaggtaccttcaagctcccttacctgaggtgctataggagggtaggagttgctttggcaactggggtagggggtagctgccagatggacacctgggatggtctcttgaggggcaccttttgccactgtgttgctatggtagtgatccagtgggatgtcagattggttgggggggcttcgaatgtttattggacctcagcctgtggctgtccttgggactctgggctgggttttggaggttgtttctggatctgttggtggttgggagtttccccacggtgtgcaccctttcatgttgaagtctgttggaacaggtagatacgttccttgcagatcataggtgtttctccaagtctctccacctgggcatgatgggaggatgaaaacgcttctgttcaggttacaccatcttttggcagttggttctgacctctacctcccttattatgttattttttgtagagttgtctttttgcttctttgcactttctttcattttctaaaacttgaattcctctttgagcctcccttcttgagtaacccttttcctctttccctcaactaacctttggccttcttccctgaccttgtagaaatggctgggctcccaggcccatcccaggtgagggtggcccaggacagagggctgtgaaacagcttcatgcaggggaaatactatagaacaggagccaggagacctgtgtctagacctggctgtgcctctgtgaccttgggcaagtcacttctctttgagcctgggcttcattgttaagatgaaggggctatagatgagatgatctctgaggcctctctgaaggtcccggattctcagaaggcttaggccagtgcatcgttatctgctggtctgggctgcattgttatctaggagtcactttggactggtttgttagtctggcaggtccagaatgatgttgggggctgggccaatgatcctgaaatttagcctgcgagcccctcccagagagcttgtgactccactgtattccttctgacatcccatatttctctcttaatttcttttcctgttcttacttaggggctctttttctagttctcactttcctcccaacccagtctggtcttaatcattttctttttaaagtaaggtaatggcagtgcgcagtggctcacgcctgtaatcccagcactttgggaggctgaggcgggcggatcacgaggtcaggcgattgagaccatcctggctaacacggtgaaaccccgtctctagtaaaaatacaaaaaaattagccgggcgtggtggcgggcgcctgtagtcccagctactcaggaggctgaggcaggagaatggcgtgaacccgggaggtggagcttgcagtgagccgagccgagatcgcggcacggcactccagcctgggtgacagagtgagactccgtctcaataaataaataaataaataaataaataaaataaagcaaggtaatgaaggtgaatgtgcttagtatgtggccagatacagagtaggtgctctgtaatattagttacagtgattgcctgctaggagtgtaggctggtgctaaaacatgacccaggtctagaaagacacacaatccacccctaactcctttcctcgtctgccactccttatccccaggattacttgttcttttatgactgcttttctccttcaaagcttctcattgctagtttttatcagatttcaggtgattaaaaaagaagggcatactatgattgctgtgttcctcaggtacattcctgtgtttctctgaccttttggatcccctaacctaactgacttggtgaacaggttctgtgatggggaagggagatggacacccttctctaggagggctggcaaaaatacaccaatcacaaatagtcatctttgttgtgctttttgtttaagattgttttcctcttttgctatggtgggtgttgttcttcggatttttttttttttttggttgatagtattttaaaaccagtctacataacaactaaaaaatgtgggaaaatagctgtagttgaaaaaaaaaaaaaaaaaaaaaaggccgggcatggtggctcacgcctgtaatcccaacactttaggaggctgaggcaggtggatcatctgaggtcaggagttcgagaccagcctggtcaacatggtgaaactccgtctctactaaaaatacaaaaattagccaggtgtggtggtgtgcgcttgtaatcccagctacttgggaggctgaggcaggagaatcgcttgaacctgggaggcggaggtggcagtgagctgagatcatgccatagcacctccagcctggggaacaagagcaaagatccatctcaaaaaaaaaaaaaaggaaaaaaaaagaaaactagttggccgggcacagtggctcacgcctgtaatcccagcacttgggaaggccgaggcaggcagatcacctgaggtcagtagttcgagaccaccctgactaacatggtgaaaccctgtctctactaaaaatacaaaaaattagccgggtgtggtggtgcatgcctgtaatcccagctattcaggaggctgaggcaggagaatcgcttgaacctgggaggcagaggttgcagtgagtgagatcacgccactgcactccagcctgggcaacaagagtgaaactctgtctcaaaaaaaaaaaaaaaaaaaaaaaaaaagacaagtctactgggcagagcatcagttgaaagttcagaagataggctctgtcccagcaattttgtgattctaagtaaattgtgaagtttcctggaaaggttagactcaccccttactgcctgcatcagtatggttccgtggaggtgagtgagaattactgtgtttcttgggaaaaaatacactacagaatatggacatgccgtttacctagcaggcctccaactcagaatagaatacatgggtaagcttagtctgttcccactggagctagcagcacttaattcaggaagaaagacctactgatgttagtgggtttaaaggtcaatcacaagaagagcgcacacacatcagtggaaaggaagaaaacagtaagaaaataccatttttgctctcaaaagatcttacaatcagtaatttggagggacttgacacttagcaagaaatacaaacaagtgcaaatgaatacagctggctatagggatttggataaagatagatacctgctgatagacagatacggatggattggctgtgagaaactgtgtaacccagtctacaccaagtaggaggataggcttaaaaactggtacatctgtgttgtttgctcacggatattttgagtctttaatcattcatgtgaaaaccctgacttttcctctagccttagggagctcaagtactagagaatgggtcctttatggggctctcaaaaatgaagttctacaatttggggctacctaggtttagtcttgggattggtagggctgtgttcctttgtattatagaatgggacattcttcttctacctactctgatgtgagaaaagattcttttcatatctctgtgactgatctaggccttctgagaattctccccagcaacttctgaggagaatacagcaaagtatagaagaaagagcatgggctttgaagtcaccgacatgggtttgattctggctctgtcactggttcctcactgtgtgaggttgggctagtcacaatcacaatctttgagcctcagttccctcacctatataatgagggtaataatgcttaccattcagggttggttgtaaatattaaatgaaatcatgtatgtgaagggcttgatataaagaaggtattcaataaattcatacttcaatgtcatttcttttttctttttttttttttgagacagagtcttactctgtcacccaggctggagtgcagtggcatgatctcggctcactgcaacctctgcctcccaggttcaagtgatttgcttgcctcagcctcctgagtagctgggattacaggcacgtgccaccacgcctggctgggtttcaccatgttggctaggctggtcttgaactcctgaccttgtggtccatccacctaggcctcccaaagtgctggaattatagacatgagccaccatgccccgctccatttctttatgttcctttgtaaggctccgtggaatgtgtgtgttcacaaatatcctttagggatcatgaagggtaaactgtgtgatctcctggattggggcttgtaggtacatccgaattttctgccctctacagagatgaaagagattatacttcgagcagaatctgcctcccttttagatagctaaggtagcccatggggcatgccagcaatgtcttgtggtatctgtacctcttggcccaaaggcttagggttgggccgcttgctcagttctctgacaagcagaatagtattcctttgtgactctgttctccaagttggagactctgatggtttccttctaacaggtttcattgaaaacagatcctgcaaaagttccaggtgcccacactggaaacttggagatcctgcttcccagaccacagctgtggggaacttggggtggagcagagaagtttctgtattcagctgcccaggcagaggagaatggggtctccacagcctgaagaatgaagacacgacagaataaagactcggtgagttaaaatgagagacatgaaagatgaggggcggggcaggcaagctaggaggaagggtctagagaagaagaacaaataatgtgcaccataaagttaggtgcaatgtaaagaacagtgttacctacctccttcctcctcctgtagatgtcaatgaggagtggacggaagaaagaggcccctgggccccgggaagaactgagatcgaggggccgggcctcccctggaggggtcagcacgtccagcagtgatggcaaagctgagaagtccaggcagacagccaaggtattctgtcctcaggtcctcccacaggatgcccaaggcactggggctgagggtgtgtgtgtgttgtgggggaacttcctgtttggcagagggtaacggtggagctcgggaggtagggaaaagacaggaattttctctttctctctaacagaaggcccgagtagaggaagcctccaccccaaaggtcaacaagcagggtcggagtgaggagatctcagagagtgaaagtgaggagaccaatgcaccaaaaaagaccaaaactgaggtgggaaacccttgtcgccatcctgacccatcttgtgaccattcttttctcagacttgcttatgctcactattcttagctggatctctcctgggacataagagaaaggccagatcatagtgcttatgagagcagttctgtctataatatgccagagagattcttagagctttgacagaccaccagatgaccaggcagggccaaaggggaccagaagagttgggggattctagtctctgggtgagaagtcttagtcggaggaacaaataaatcttaaggaaaatgcagaagtggtctttcttttttattgtttttttttgtttgtttgtttttgagacagtttcgctctgtcacccaggctggagtacagtggcacaatctcagctcattgcaacctccgcctcctgggttcaaacaattgtgcctcagcctcccgagtggctgggattataggcatgagccaccatgcccggctaatttttgtatttttggtagagacagtgtttcaccatgttggccaggctggtttggaactcctggcatcaagtgatccgcccgcttcagcttcccaaagtgctgggattacaggtgtaagcctctgtgcccggccagaagtggtataaaaaccaagggcttgggggatggaggatggttaaagtggtggttatgagatggtggaagacagggagttggagtcagctgtgggtagagacaaggtgcttgagatggatccttgaggaaggaatagggttttacaggcgggaaacaagactggctgctagggagcagccaagaatgtgaggaaagtgagaaatccccagatggtaagaggtgggcttgagcaagagtactcaccacatcacagtacaacagtgtgctgtgaggggaaatgattttatgcaagagagccccaaatctcagggaagcaggaaaggaaaagagaaaaaatgagtcttcccttttctacagcaggaactccctcggccacagtctccctccgatctggatagcttggacgggcggagccttaatgatgatggcagcagcgaccctagggatatcgaccaggacaaccgaagcacgtcccccagtatctacagccctggaagtgtggagaatgactctgactcatcttctggcctgtcccagggcccagcccgcccctaccacccacctccactctttcctccttcccctcaaccgccagacagcacccctcgacagccagaggctagctttgaaccccatccttctgtgacacccactggatatcatgctcccatggagccccccacatctcgaatgttccaggctcctcctggggcccctccccctcacccacagctctatcctgggggcactggtggagttttgtctggacccccaatgggtcccaaggggggaggggctgcctcatcagtggggggccctaatgggggtaagcagcaccccccacccactactcccatttcagtatcaagctctggggctagtggtgctcccccaacaaagccgcctaccactccagtgggtggtgggaacctaccttctgctccaccaccagccaacttcccccatgtgacaccgaacctgcctcccccacctgccctgagacccctcaacaatgcatcagcctctccccctggcctgggggcccaaccactacctggtcatctgccctctccccacgccatgggacagggtatgggtggacttcctcctggcccagagaagggcccaactctggctccttcaccccactctctgcctcctgcttcctcttctgctccagcgccccccatgaggtttccttattcatcctctagtagtagctctgcagcagcctcctcttccagttcttcctcctcttcctctgcctcccccttcccagcttcccaggcattgcccagctacccccactctttccctcccccaacaagcctctctgtctccaatcagccccccaagtatactcagccttctctcccatcccaggctgtgtggagccagggtcccccaccacctcctccctatggccgcctcttagccaacagcaatgcccatccaggccccttccctccctctactggggcccagtccaccgcccacccaccagtctcaacacatcaccatcaccaccagcaacagcaacagcagcagcagcagcagcagcagcagcagcagcagcagcagcagcatcacggaaactctgggccccctcctcctggagcatttccccacccactggagggcggtagctcccaccacgcacacccttacgccatgtctccctccctggggtctctgaggccctacccaccagggccagcacacctgcccccacctcacagccaggtgtcctacagccaagcaggccccaatggccctccagtctcttcctcttccaactcttcctcttccacttctcaagggtcctacccatgttcacacccctccccttcccagggccctcaaggggcgccctaccctttcccaccggtgcctacggtcaccacctcttcggctaccctttccacggtcattgccaccgtggcttcctcgccagcaggctacaaaacggcctccccacctgggcccccaccgtacggaaagagagccccgtccccgggggcctacaagacagccaccccacccggatacaaacccgggtcgcctccctccttccgaacggggaccccaccgggctatcgaggaacctcgccacctgcaggcccagggaccttcaagccgggctcgcccaccgtgggacctgggcccctgccacctgcggggccctcaggcctgccatcgctgccaccaccacctgcggcccctgcctcagggccgcccctgagcgccacgcagatcaaacaggagccggctgaggagtatgagacccccgagagcccggtgcccccagcccgcagcccctcgccccctcccaaggtggtagatgtacccagccatgccagtcagtctgccaggtgagcggccaggtggggcggaggtgggcctggaaaggggacgacgacaaggcggcgacgagagagggagtagcagggaggggccttgcgctggtgtagtgttttagaaaagcacgcccctctcctccgtccaggcctagtggccagtgaggcccgcagcagctcacagcctgcaggggtggttttgaggcgggggctacaagcactcgccggggccgcggcgctgcgggctccatcgggcagctcgcaccgcctgagcgcccgctgcttccacgcccggcaggttcaacaaacacctggatcgcggcttcaactcgtgcgcgcgcagcgacctgtacttcgtgccactggagggctccaagctggccaagaagcgggccgacctggtggagaaggtgcggcgcgaggccgagcagcgcgcgcgcgaagaaaaggagcgcgagcgcgagcgggaacgcgagaaagagcgcgagcgcgagaaggagcgcgagcttgaacgcagcgtggtgagtgcgtcactgcctgcgccaccgccttctttccctctttccttccttccctctgcgctgcgctgcgctacgctacgctgcggggctgtggctgggtgggcgggcgagtcacgtcgccacctgtcggaggggaggtaccactgcagcccaggaaatggagcccaaaaggttttcagcgagagccatctgcattcctgggttgggaaaaggcatgctcagatgggactacctgtggatcccaagaagggcaaatattcgggagcgggggccgcagttaagttccaggtgggcagagtttcaatgagttgaggcattttggcattcggctgtcgaaacaaatgggcagcttaaaaccagccacctcttttcataactgccgctttgactccacttttccctgtatcccacagaagttggctcaggagggccgtgctccggtggaatgcccatctctgggcccagtgccccatcgccctccatttgaaccgggcagtgcggtggctacagtgcccccctacctgggtcctgacactccagccttgcgcactctcagtgaatatgcccggcctcatgtcatgtctcctggcaatcgcaaccatccattctacgtgcccctgggggcagtggacccggggctcctgggttacaatgtcccggccctgtacagcagtgatccagctgcccgggagagggaacgggaagcccgtgaacgagacctccgtgaccgcctcaagcctggctttgaggtgaagcctagtgagctggaacccctacatggggtccctgggccgggcttggatccctttccccgacatgggggcctggctctgcagcctggcccacctggcctgcaccctttcccctttcatccgagcctggggcccctggagcgagaacgtctagcgctggcagctgggccagccctgcggcctgacatgtcctatgctgagcggctggcagctgagaggcagcacgcagaaagggtggcggccctgggcaatgacccactggcccggctgcagatgctcaatgtgactccccatcaccaccagcactcccacatccactcgcacctgcacctgcaccagcaagatgctatccatgcaggtgagacccctccttccttgccctggccctttggggccaccttccccctatcatgactgggctctttcattcctatggccaagactttcctcccctggcctggcatgaacctttcctgagattgctgccctgaactttgcctccctgacgttctctcagccttgtcttctcatggccttccctggccacaaagcctgtatgccccacagcccagttctctccatagtctagtatccttcccatgacagaggcccacacgggagcttttgaaggacacttttctattctcacagccccattctcccaagcccttcacaaacctgtcttcttatttatttttttgagacatggtctggctctgccacccaggctggagtgtagtggcgcaatcacagctcactgcagcctcgacttcccggtctcaagtgatcctcctacctcagcctctggagtagctgggattacaggcgtgtgtcaccatacctggctactttttgtatttttggtagagacggggtttcgccatgttggccatggctggtctcaaattcctgagctcaaagcgatccacccacctcggcctcccaaagtcctgagattacaggcgtgagccaccgtgcccaacccacaaacctatcttctgatttctctggattcaactcattttttgccattttctcctcttctccctctgcgaggtctttcatgtttttccccatctctagatctgtaactttctagaaagggccctgtagctttgggtttgggtgtcataggcgataatgagctttacttactatcctttcaccattttttggtttttgagacggagtctcgccctgtcaccaagctggagtgcagtggcgcgatctcggcttactgcaacctccgcctctggggttcaagtgattcttctgcctcagcaggcactgcctgcccgagtagctgggactgcaggcgtgtgccaccaagtacagctaatttttgtatttttagtagacacggggtttcaccatgttggccaggatagtcttgatctcttgaccttgtgatccacccgccttggcctcccaaagtgctggaattacaagcgtgagccaccgcacccggcttcctttttttcttttgcccagactggagtgcagtggcgcgatctcggctcactgcagcttccacctcccaggttcaagcgattctcctgcctcagcctcccgaggagctgggactataggcgtgtgccaccctgcctggctaatttttttgtattttttgtagaaacagggtttcaccatcttggccaggctggtcttgaactcctcacctcaggtgagctgcctgcctcagcctcccaaagtgctgagattataggcttgagccactgtgcccggcctcttcttgtcttattttctaaacttctatcatcttccaccttcttcacgcagtctacctctctctgtccttcccctcagacccttctgatgactgtaatctcctgtcctgtgtcatccatatgtccctcctccagtagggctcagcctgtccacccctgccaggcctctagttcttccactctgcctttgttccactttggacctccttgtgtttgtctgactcagttcccaggcttggatcccttcacccaaatgcatggtttgccccaaacctgccttctggtgacaccttcctcttctctgccctccagcctctgcctcggtgcaccctctcattgaccccctggcctcagggtctcaccttacccggatcccctacccagctggaactctccctaaccccctgcttcctcaccctctgcacgagaacgaagttcttcgtcaccagctctttggtaaggatggaagttggggtaggcagctccaatgagaaaagggcagaaaggaggtatttgggtggggggatgggcctagttgggcttggggagggatgaggaggtgcctagaggagctgggcatgggaataggagagctggagctctgcccaagagaagcacgagttttagtgtcagcctaagaggttcgaatcccaattccaccctaccactggcaacttacagaactgggtgtgttacctcactttttagttcattacctttgtatgtaaaggagctggctatcccctggtccagagcaggtacttgttatccgttggtcatatgccccttgcccttcctgctcacagctgccccttaccgggacctgccggcctccctttctgccccgatgtcagcagctcatcagctgcaggccatgcacgcacagtcagctgagctgcagcgcttggcgctggaacagcagcagtggctgcatgcccatcacccgctgcacagtgtgccgctgcctgcccaggaggactactacaggtaccctagggtgccccagcccaggggacatgggctcagcgagcctgggaggagctgtgggcatggtacggctgggcaccgtgctcctgggggagggaacccctcctctcccaaccccttcggtaagagggggcaaggtcagagttggtctcaagtctcttacctctctgctatgcactgccccttccctagtcacctgaagaaggaaagcgacaagccactgtagaacctgcgatcaagagagcaccatggctcctacattggaccttggagcacccccaccctccccccaccgtgcccttggcctgccacccagagccaagagggtgctgctcagttgcagggcctccgcagctggacagagagtgggggagggagggacagacagaaggccaaggcccgatgtggtgtgcagaggtggggaggtggcgaggatggggacagaaagcgcacagaatcttggaccaggtctctcttccttgtcccccctgcttttctcctcccccatgcccaacccctgtggccgccgcccctcccctgccccgttggtgtgattatttcatctgttagatgtggctgttttgcgtagcatcgtgtgccacccctgcccctccccgatccctgtgtgcgcgccccctctgcaatgtatgccccttgccccttccccacactaataatttatatatataaatatctatatgacgctcttaaaaaaacatcccaaccaaaaccaaccaaacaaaaacatcctcacaactccccaggaacatggctgtgactattctttgcgggatatgggggtgaggctgggtctcagtgcagcggtgcttagagagaactgcagccagggcctggcagggaagcgggaagagaccagaccttcttaaggaacggggtgtgggggctgggaagaattggagaggggatccctgaagagcccagagccttgactcagctggaggcggtaccatgggtgctggtgccccctcctgccccaaggctgggcaggaccgctgcgcgccagtggaggcctcggtctgggctctgtggcttatgcctgtgagacgcgggtggattgcttgagcccaggagttggaaaccagcttgggcaacatagagaaaccccatcttaagacaaaatcagctgggggttgtggtgcacttgtggtcccagctactcaggaggctgaggtgggaggatcacttgggggtcgaggctacagtgagtcatgatcgcaccactgcactctagcctgggtgacagagcaaggccctatctcaaaacaaacaaacaaaagacaccccaaccaaccaaacactagaggcctgggacaggcccacctctgacgtggtcagttctaggaatctattcagacgggtctcactgctaggagccaccagagtcctccggaacaagggcttcagagtcctgaaacctttccgtggaatactttaagaaacggttatgaggccaggcgcgacggctcacgctggtaatcccaggactttgggaggccgaggcgggcggatcacgaggtcaggagttccagaccagcttggccaacatggcaaaaccctgtctctactaaaaacaaaacattagctgggcatggtggcgcgcgcctgtcgtcccagcgacttgggaggttgaggcaggagaatcgcttgaacccgggaggtggaggttatggtgagccaagatcccccccagctgcactccagcttggcgacagagcaagactccgtctcaaaaacaaaaaacaaagc

SEQ ID NO: 117 - DNA, 4367 bp, Homo sapiens
gacgccatactggacgccaagtgggaggaacttcaaggctgtcccctgcgggcctcccgctctgcttctgcgaaggtttcattgaaaacagatcctgcaaaagttccaggtgcccacactggaaacttggagatcctgcttcccagaccacagctgtggggaacttggggtggagcagagaagtttctgtattcagctgcccaggcagaggagaatggggtctccacagcctgaagaatgaagacacgacagaataaagactcgatgtcaatgaggagtggacggaagaaagaggcccctgggccccgggaagaactgagatcgaggggccgggcctcccctggaggggtcagcacgtccagcagtgatggcaaagctgagaagtccaggcagacagccaagaaggcccgagtagaggaagcctccaccccaaaggtcaacaagcagggtcggagtgaggagatctcagagagtgaaagtgaggagaccaatgcaccaaaaaagaccaaaactgagcaggaactccctcggccacagtctccctccgatctggatagcttggacgggcggagccttaatgatgatggcagcagcgaccctagggatatcgaccaggacaaccgaagcacgtcccccagtatctacagccctggaagtgtggagaatgactctgactcatcttctggcctgtcccagggcccagcccgcccctaccacccacctccactctttcctccttcccctcaaccgccagacagcacccctcgacagccagaggctagctttgaaccccatccttctgtgacacccactggatatcatgctcccatggagccccccacatctcgaatgttccaggctcctcctggggcccctccccctcacccacagctctatcctgggggcactggtggagttttgtctggacccccaatgggtcccaaggggggaggggctgcctcatcagtggggggccctaatgggggtaagcagcaccccccacccactactcccatttcagtatcaagctctggggctagtggtgctcccccaacaaagccgcctaccactccagtgggtggtgggaacctaccttctgctccaccaccagccaacttcccccatgtgacaccgaacctgcctcccccacctgccctgagacccctcaacaatgcatcagcctctccccctggcctgggggcccaaccactacctggtcatctgccctctccccacgccatgggacagggtatgggtggacttcctcctggcccagagaagggcccaactctggctccttcaccccactctctgcctcctgcttcctcttctgctccagcgccccccatgaggtttccttattcatcctctagtagtagctctgcagcagcctcctcttccagttcttcctcctcttcctctgcctcccccttcccagcttcccaggcattgcccagctacccccactctttccctcccccaacaagcctctctgtctccaatcagccccccaagtatactcagccttctctcccatcccaggctgtgtggagccagggtcccccaccacctcctccctatggccgcctcttagccaacagcaatgcccatccaggccccttccctccctctactggggcccagtccaccgcccacccaccagtctcaacacatcaccatcaccaccagcaacagcaacagcagcagcagcagcagcagcagcagcagcagcagcagcagcagcatcacggaaactctgggccccctcctcctggagcatttccccacccactggagggcggtagctcccaccacgcacacccttacgccatgtctccctccctggggtctctgaggccctacccaccagggccagcacacctgcccccacctcacagccaggtgtcctacagccaagcaggccccaatggccctccagtctcttcctcttccaactcttcctcttccacttctcaagggtcctacccatgttcacacccctccccttcccagggccctcaaggggcgccctaccctttcccaccggtgcctacggtcaccacctcttcggctaccctttccacggtcattgccaccgtggcttcctcgccagcaggctacaaaacggcctccccacctgggcccccaccgtacggaaagagagccccgtccccgggggcctacaagacagccaccccacccggatacaaacccgggtcgcctccctccttccgaacggggaccccaccgggctatcgaggaacctcgccacctgcaggcccagggaccttcaagccgggctcgcccaccgtgggacctgggcccctgccacctgcggggccctcaggcctgccatcgctgccaccaccacctgcggcccctgcctcagggccgcccctgagcgccacgcagatcaaacaggagccggctgaggagtatgagacccccgagagcccggtgcccccagcccgcagcccctcgccccctcccaaggtggtagatgtacccagccatgccagtcagtctgccaggttcaacaaacacctggatcgcggcttcaactcgtgcgcgcgcagcgacctgtacttcgtgccactggagggctccaagctggccaagaagcgggccgacctggtggagaaggtgcggcgcgaggccgagcagcgcgcgcgcgaagaaaaggagcgcgagcgcgagcgggaacgcgagaaagagcgcgagcgcgagaaggagcgcgagcttgaacgcagcgtgaagttggctcaggagggccgtgctccggtggaatgcccatctctgggcccagtgccccatcgccctccatttgaaccgggcagtgcggtggctacagtgcccccctacctgggtcctgacactccagccttgcgcactctcagtgaatatgcccggcctcatgtcatgtctcctggcaatcgcaaccatccattctacgtgcccctgggggcagtggacccggggctcctgggttacaatgtcccggccctgtacagcagtgatccagctgcccgggagagggaacgggaagcccgtgaacgagacctccgtgaccgcctcaagcctggctttgaggtgaagcctagtgagctggaacccctacatggggtccctgggccgggcttggatccctttccccgacatgggggcctggctctgcagcctggcccacctggcctgcaccctttcccctttcatccgagcctggggcccctggagcgagaacgtctagcgctggcagctgggccagccctgcggcctgacatgtcctatgctgagcggctggcagctgagaggcagcacgcagaaagggtggcggccctgggcaatgacccactggcccggctgcagatgctcaatgtgactccccatcaccaccagcactcccacatccactcgcacctgcacctgcaccagcaagatgctatccatgcagcctctgcctcggtgcaccctctcattgaccccctggcctcagggtctcaccttacccggatcccctacccagctggaactctccctaaccccctgcttcctcaccctctgcacgagaacgaagttcttcgtcaccagctctttgctgccccttaccgggacctgccggcctccctttctgccccgatgtcagcagctcatcagctgcaggccatgcacgcacagtcagctgagctgcagcgcttggcgctggaacagcagcagtggctgcatgcccatcacccgctgcacagtgtgccgctgcctgcccaggaggactactacagtcacctgaagaaggaaagcgacaagccactgtagaacctgcgatcaagagagcaccatggctcctacattggaccttggagcacccccaccctccccccaccgtgcccttggcctgccacccagagccaagagggtgctgctcagttgcagggcctccgcagctggacagagagtgggggagggagggacagacagaaggccaaggcccgatgtggtgtgcagaggtggggaggtggcgaggatggggacagaaagcgcacagaatcttggaccaggtctctcttccttgtcccccctgcttttctcctcccccatgcccaacccctgtggccgccgcccctcccctgccccgttggtgtgattatttcatctgttagatgtggctgttttgcgtagcatcgtgtgccacccctgcccctccccgatccctgtgtgcgcgccccctctgcaatgtatgccccttgccccttccccacactaataatttatatatataaatatctatatgacgctcttaaaaaaacatcccaaccaaaaccaaccaaacaaaaacatcctcacaactccccaggaaaaaaaaaaaaaaaaaa

SEQ ID NO: 118 - DNA, 18569 bp, Homo sapiens
ggagcaactcgctgaagccgagggcagaactggcggaagtgacattatcaacgcgcgccaggggttcagtgaggtcgggcaggttcgctgtggcgggcgcctgggccgccggctgtttaacttcgcttccgctggcccatagtgatctttgcagtgacccaggtaacagattgtactcttttctgacggttcgggcgaaggccaccactgcactgaggcctgggggcaatggtggggaagagactaggaattggcgcgcgtgcaggcccctcgggggacgttcctccctttcgtgctgccgccgttccggcctgtaacggccactcggccgccactcccgcctggtgccctactctgctgtgtttcgcaggcagcttcccatcgtacgattgtggggctcagggtactactggctggctgggcggcggcaggcgggacaggacagtcccttgcatcgaagaccctaagtttaccctgccctgtcctgccatccgcttcttctccatgttagaagcagattcacccagatctgtgcccgcctgttttgctgccaacattgagacttaaatattttgtcagaagcctgagacagcgggcacggtagcgcttaagatataatacacaccactttatttgcagggtctcccgtctctcggttcaggccatcatggttttccaaatctctaggtagacttttctgtgaaaagactgtgcttcatttagttatacagacactagaaggctatgcagaattaatttgattgcctccaaaaaatatcggatttgatgtttcaatttccaggagatgaagatacccagcaaacaactcttttctgaggataaattagtgcagtaatcactgtgcggtttcttctgtagacttacttgcaaaaagtggcctgaagccaccgaaggtcctggataaatctctaatcatacttataatggctttaaatcctgccgtcattatctcttgcctcaaccttagattcctgaaacgaaacttccgtcctccagttttactcctctcaaattcatctagtcttgccaaattagatctgttcatactgcacttccgaaattccataactgttattattgcctatgcaataacattgaaaactcctgatagtatgagcccaccaatatgtgctgtctcatctgctgcagtgaccttctatacagtcatactaagcttgttgcctgcatactgcatgctttttcaatctgtctctttctgcttgatttctcttttgtctgaagccctgatgtgtaaattcctactcaccttgtgagacccaagttagatggtccctgctttgtgaaaacactgcgctctcttcacagtgattggctgttagtctatattgtcttctcttccaggggtgtatatgggctcattcatgatcacatactgtattccaggcatagtgctagatgcagagatcacaaagacatgtaggctggtttctgcattcaaggaacttagcttagaccatacctgctgttataatactatgttttacagtagttatttgcatacccttcatattgaacactttgatgccaaggactatatcctcctatctttatatcctcatctgcaggacttctgttattgttattataggataactgtcaaaaaaaaagtatattttaaaaaatatctctgatatatttatttccagaagcagagcttgctttcttttttggtctgtttttcagtgatgagtatgtaggatagatagtctttgggggcctttgccctttcaaagtgatcgtcagagtctttcatacattcagcaaatatctgagtgtctgttctgtaccagcacatgcttgaagtgcatatgcctgaaggatctttggacatataatttgtaactttgagacctctaagttctatgtgagaatatgttgttataaactcatttcagatgtgtagtgagtaaagcgatgatgatttaagaaaagtcagataacaggcacagtttgcattaatgtgttctaaagaggtaaggttattacatttataaaaattcagggctttatctttgtgcggcttttttttttttaacagtttcattacagtaggagcttgataaatgatcactctgaagtatattggattgaatttgatatttacttaattttttgcccaagacattgtagaggatgtaaaattggaatatttaaagatctaaactttgcctaacagtgctgtgtatacagtgcttagtgaatattctgctctgatattacattttgcttaggaattatttttctctaggtgtttttcctcaaaagtttttaatgctggttatgacagctcgattttgagcattttccgattatttaaacatgtaacaaaatgatttttgttttgttggcgattttacatgcaatcgccggaaacatggaaggaataaaactttaggattataaggtaaaaacaaatgtattccaaaatagcttcattggttttcatgtttgtgttttgtatagccatagaactggcttataggactgtacaggttacctggatccttaaattaaactttagacttttttccaaagcagcatcactgtttcttggcgtgtgaagataacccaaggaattgaggaagttgctgagaagagtgtgctggagatgctctaggaaaaaattgaatagtgagacgagttccagcgcaagggtttctggtttgccaagaagaaagtgaacatcatggatcagaacaacagcctgccaccttacgctcagggcttggcctcccctcaggtaatatagcaggagggagagaatagggagggcggaaatctgaactgcaagagatggtatcaaaaggcaaggaagggcatttaatgatctgtttttgaaaatggtttaatatgttttttaagccttattttgttgagaagttctattaggctttgaataggcacaatggtgtttatttgggaagtctggaagctaagttatatatttatgaaacacctaatcttttgataaacacttatgagaatgttccaaatgactatatagggtctttgattttgaaaatcaccctcaccaaattattttctagttttatttttccccttttacatttcaagctctcaaccacccatctactttaaaaatttttcagcctgggtgcagtggctcacgcctgtaatcccagcactttgggaggccaaggtgggcggatcacctgaggtcaggagttcgagaccagcctggccaacgtggtgaaacctcatctctacaaaatatacaaaaattagccaggtgttgtggcgggtgcctgtaatcccagctactcgggaggctgaggcaaggagaattgcttgaacccgggaggtggaggttgcagtgagcagaggtcgtgccactgcactccagcctgggagacagagcgagactctgtctcaaaaaaaaaaaaaaaaaaaaaaaaatcaataacttttgttgaaatatacatacaaaaaaactcattttaagtgtctgttttgataattatatataatgtataaattacagaacatttcagttaccttaaaaagtcccttcttcccctttatagtcactctgctggccccaggtaactactgcatctgcttttcaatgctgaagattagttttgtctattctagaatttcatatagatggaatcagagtgtatgcttttttgtgtatgtctgacttcttagcccagtgtactgtttgtatatcagtagttaatccattgtatagctaagtatcactccattgtttggatgttccacagttcatccattctccagttgctcacatttggggtctttccagtttggagctattgcgaataaaagcactgtaaacatttgtgtagactttgaatgcactgtttttacttctcatgggtaaatacttaggagtaggattgctaggtcctatattggtatatgtataactttataagaaactgccaaactgttttttgaagtggctgtattgttttgcagcataagagatttaagttgctccacatcctcaccaacactttctgctgtcagtctttttactttcactctagtgattgcttagtagtatcttattgtggttttgatttttatttgcctgattactaatgtttctgagcaccttggcaagtgcttgtcagccactcatacacaggcccacctcactttactgcacttcactttactgcatgtttgacaaattgaaggttgtggtaaacctgtacccagcaagtctgttggcattatttttccaaaagtgtgtactcacttcatgtcttggggttagattttggtaatttttgcaggatttcaaactttttcattattatccgttattgttatcaaacttttttttttctttttttttgtattttttttttaattttttttttcagtcactctgttgcccaggctggagtgcagtggtgcagtcttggctcactgcaaactccatctcccgtgttcaagcgattctcctgcctcagcctcccaagtagctgggattacaggcatgcgccaccacacccagctaaattttgtatttttagtggagacggagtttcaccatgctggtgtcaaactactggctgcaagtgatccatccgccttggcctcccaaagtgttgggattacaggcatgagccactgtgcctagtcaaaccttttcattattatctgttattgtgatcagtgatctttgatgttactattgtaattattattgaatgccataaactgcacctgtataatacaggaacttaattgataaatgtctgcagcgtgaccaaccattcccccatctctctccctctgcttggtcttccctattccttgagacacaacaatatggaaattaggctaattaataaccttacagtgacttttaattaagtgttcagatgaagggaagagctgcacatctctcatttgaaaccaaaagctataaatgattatacttagtgaagaaggcatgttgaaagctgagacaggctaaaagctaggcctcttgcaccaaatagttagccaagttgtgaatgcaagggaaaagttcttaaaggaaattagaagtgctactccagtaaacccacaagtgataagaaagcaaaacagccttattgcttatatggagaaagtttgaatggtctggatagaagatcataccacccacacatccccttaagccaaagtgtaatacagagcaaggccttaactctcttcaattctgtaaaggctgagagcggagaggaagctgtagaagaaagttttgaaactagcagaggtttattcagagctttaaggagagaggccttctccacaacataaaaatgcaacatgaagcagcaagttatctggaagatctagctgagataattgatgaaggtgactatactaaataatagatttttaatgtagatgaaacagccttctactggaagaagatgctatctaggacttttatagctagagaggagaaatcagtgcctagcctcaaagcttcagaggactggctgactagttaggggctaatagagctggtgagtttaaattgaagccaatgctcatgttctgctctaaaaccatagagccttaagaattacgctaaatctactctgcctgtcctcagtaaacagaacaacaaaacctgatgagagcacgtctgtttacagcatgatttactggatattttaagctctttgagatctgctcagaaaaaaagtttaatttcaaaatattactcactgacagtgtaactagttgtccacaagctctgatggagaagaacaaggagattaatattgttttcatgcctgcttaaataatatatccattcttcagcccatggatcaaggagtaatttcaactttcaattcttactatttaagaaatacagcagggcatggtggctcatgcttgtaatctcagtactttgggaggccaaggtggaaggatcactcaaagctaggagctcaagaccaacctgggtaacaaaacaagtccctgttgctacaaaaaaaaatttttttttaattagctggtcatggtggcatgtgcctgtagtcccagctacttgggaggctgaggcgggagggtcacttgagtccagaagttaaaggctacaatggagaccctgtctcaaagaaaggaagcagggagggacatatgctgtagctgccatagatagtgattcctctgatgaatctgggcaaagtgaattgaaaaccttctgaaaaagattcaccattctagatgccattaagaatgttcatgattcatgggaggagggtgaaatatcaacatgaataagagtttggaagaggttgattccaaccctcgtggatgactttgagaggttctagacttcagtgctggaagttactgcaggtgtagtggaaatagcaagtgaactagaattagaagtgaacctgaagatgtgactgaattgctgcaattttttgataaaacctgaacagatgaggagttgcttcttgtgagtaagcaaagaaagtggtttcttgagatagaattgactcctggtgaagaactgatgactttagaatattacataaacttagttgataaagcagcagcagggtttgagaggattgactccaattttgaaataagttctagtgtgggtaaaatgctgtcaaatagtatcatatgctacagagacatcttcagtgaaaggaagagtcagtcagtgtggcaaacttcgtcagtcttattttaagaaattgccacagctaccaccctgatcagtcagcagccatcaacatcgaggcaagatcctctgtcagcaaaaagattatgatttgctgcaggctcacatgattgttagcatttttagcaataaagcatttttaaattaagttatatacatattattagacataatgctattgcacacttaatagactttagtgctaacataacttttgtaggcactgggaaaccaaaaaattgatgccgcttgctttattgagatggtctggaacctaacctgtagtatctccgaggtatgcctgtatcttcatttgtaatatgtccttcacatcttttgcccttttttattattttatttgttgatcttcttttatggagttgtcagagctctttattattctgtttaccagtcctttctcagatgtatgtattatagttatttttttcccagtctggcctgccttttaattttctcaatggtgtctttcaaagaacagaagtttttaatttttccgaagttcagtttatccatttttcttcatgtttatccactgtgtggtattaaagaagaaagcaatgtgtataagaatagctggttcttccgtaattaatgtttaataaccccattattctccgaaggcatctgtctttgcacacctgacctgctgttccaccaagaaagttccacaaacacttagcagcagccagcctaacctgtttttctccttgctttccacagggtgccatgactcccggaatccctatctttagtccaatgatgccttatggcactggactgaccccacagcctattcagaacaccaatagtctgtctattttggaagagcaacaaaggcagcagcagcaacaacaacagcagcagcagcagcagcagcagcaacagcaacagcagcagcagcagcagcagcagcagcagcagcagcagcagcagcagcagcagcagcaacaggcagtggcagctgcagccgttcagcagtcaacgtcccagcaggcaacacagggaacctcaggccaggcaccacagctcttccactcacagactctcacaactgcacccttgccgggcaccactccactgtatccctcccccatgactcccatgacccccatcactcctgccacgccagcttcggagagttctgggattgtaccgcagctgcagtgagtacttcgtgttttatgtttcctcccacttaggagtccctttgagttatgttcctgctctgttttcagatggatccttttattaagggagggagtggcactaacggtaattgtgtatcaaaatttgctttatctcacatttgggaaagggaagcaaagctatcttagtcagtgtcctcagtaaaaggctcttaacaggtttagaaatgtggtcatttgtgtttacatacctgagccaataaaatttaatctgactttcactgtcgttattattatattatagacatttccctgtatctgatatcgctaaatcacaatgttaggtagtctctttcccttatgctattttaggtctttagtcacaatatcagtataatttctggtagttcttgttttttgtttttactatgggtgctgcatataaatctttgaaggtctgtgtccttcccacaaaatgaagacgactgtttttgtcataaatggatttttctacctaaatgaagtgggttctatatgtaacagtgtagtaggggtaggaaataatttcatcttcctgaaaaaccagcaaatatttccaaataattccagtcaataagaagtgtatagcttttcattttagaaagcttatgaccaaattaaaaggttacttgcagtctctgcatctcctcagttttcttgtacagataccttcctccttcatactccctttagatctagtatttcctatttgcatttattcaccttgttacatatatggttgttgtttataagctatctctcatcatttttggaactaagtggtgtgtaatcgtggatgctgactttcacccaaagacctaaatcttgcctccacaattttgtttgaccccacacacaattttaaaaacaaagtaattttagtgattttagagagagccctttttagctcacccttgtctataccactcccatgtgtccagcatgcttgtctgactcccaggaatatttaagtttgcatttctgatttaaataataaattataaacagtacagtcaggtgtttgtttcttgcgagtgcctttgctgttctgatactccccagagcatccagtcatccacattcctgaatttccactatctactaagaaccctcccgggtggtagttcagtgccctctccatcttgtaggcttaagagggattaaggtaaatatttaattaatgaaaatatataagaatacatttaacaattatgtgactaaagttgtgatagatatactaaaatctacttggtatagttcataagtggacaaatgctaaaggcaggtgtgtatacaagggtgattggaaggaaatagatgatatggaaatgaaaacattcattgtgtggatcaacctaattggctttacagttgtgtatcatagactgtacaagaaaaagaaccagaagcaacaatgagctgaaacctattgtatttgaacctatgtatttgaaatctggactcgatattcttgggatggtgatttccaggtccatgcgagacagttgttgagcagttaattgcattcaaagggcattgcccatttcaactatatatactttcataagcagaaaaatgtataatgaaaatgtgggtttgttgtttaaatttttattaaaatttctaatagagttgctttttagtatatctttatccttgtataagttattcgttaagtgatttaagaacactgagaaatgaaaagggtcagtggacccagatggctccatttatccttatttactgagagttaattagaagagaaagcagggttttgccttttttttttgctaaagacacttagctcttgtttttcaaaagatacttactttgagagaactgggcagttcatgcctgcttgttttcattataaatagttacttaggaatagggtggtggtggtagcttttcagagctcacagatgagaattgagtttgtctgtgagaaggctaagggcaggctctggagacagacagactcaaatcctggctcctccacttgggagccattgcgtcctgagcaagttgcactctacctttaagcctcagcttatttatccaaatgtgggaatactggtaacttctacctcagtgcgttatatgtattaaatggaataatctatataaaatgctcaacatgtgcatgatacttgttaaacaataaatgtgagcaattaaaaaaaagtaaagcctggttgaaataatcagatgtctgcataatttctaacgcctcatccaatgaaacttaagtaatttaaatagtcgtgttttctttttaaatctcttacagaaatattgtatccacagtgaatcttggttgtaaacttgacctaaagaccattgcacttcgtgcccgaaacgccgaatataatcccaaggttagatctattttaatgtatttcttttttttttcttttttgtctcctctgccgtgtctctatattttaatgtatttcacgctataaaacaaatgtctgtagatcaggccaggcacagtggctaatgcctgtaatcccagcactttgggaggctgaggaaggagaatttcttgaacctaggagttcaccaccagcccaggcaacatggcaagaccctgtctcttaaaaaaaaaaaaaaaattggccgggcttggtggctcacacgtgtaatcccagcactttgggaggccgaggtgggcggatcatctgaggtcaggagttcaagaccatcctggccaacatagtgaaaccccgtctctactaaaaatacaaaaatttgccgggagtggtggcatgcgcctgtaatcccggctacttgggaggctgaggcaggagaatcacttgatcctgggaggcagaggttgcagtgagcggagattgcgccattgcattccagcctggcaacagagcgagactccgcctcaaaaaaaaaatctgtatatcaaagagtttgtgttatgcttattccttgacaccaataaaatgaagatctaaagtaaaatgtgcattgttttgtatcttttattgagtgtctgtgatataagaatccctgggagtacagcagtctataaaataagctaagttatatatgtattgtattgggatcatgtgaagaattttgtatatgtatagggatgatgttagccagctatagtaggcaaagtaatttggataaacattagctgggttgagagaaatgttaagtaatggacttagggtgcattttaaaatccctgaaacataatgcctgagatctgaaagacagctaagggtctgaaaatcaccttttaaccactcataatgagtctgtatgacatgtagcattctaagaattaatctttcatctattataatcacatttagttgaatacataattttattactttacgttcttaagtgatatttaaccaataaaaatagtagaggaaattctggaaattcaaaatagctaggcttttcctgggacgtatataaactactatatactgctagcttttttagatgttgataaaatcacagggaagacatagagcaggttttaaactaaaattgttaaaagccaggcatggtgactcagacctgtaattccagcactttgggaggccaaggtgggaggatcacttgaggccaacagttcaagacgagcctgggcaacatagcaaggccttgtttcatcagaaaatttaaaaaattatctggggttggtggcacacacctataatcccagctacttgggaggccaagacagaaggatctcttgagctcaggaattcgaggctgcagtgagccatgattgcaccactgcactccagtctgggcaacaaagtgagactcttgtctctaaaaaaaaaaattaataaaataaaaaaataaaattgttaaagcaatctagtttgtcaaagagtcgtcttaattagaaacatgtaggtttttattgtataattaaatgtattaaaatatttaagttgtttcaaagtaattatttgctttttatcatgtacctaataactgaggccattaattcaacccacagttgaaatattttccccttgagttaccaccttagcaagaaaattttctgaaagaattaacatgtttcaagcataaaaagcagaaaataaaagttaaaactgtgtttttttcctaatttgcatttatgtgtttaatacattaatattgtttctaaagaccaattgaaagcatgattttacttcattacgtattgataggcttgtaatctgatttattaattccattaaggtagaaaaggtttattggtttatttgcctcaaaattcatattaataaaacaaaatgtatcagagaagctatagtcatgataagcagcaaatataaagtagaaacagaagcacttgtatttattgagaacataaccaaattttgcaaacatttctcttgatggaatgctcatgtgaaagaacatacagatttggtataacttagtcacaattgattattttctgctccttatgcaaaggaatatttgttacatgtggtgtatgcaaatcctttacagatatacagaaatacagaacaaatattttgataactagatgtactatgtccttcctaccagttgtgatttttttgtcaatgggtggttcgcctaacaacattgagcagtttggcatgacctcactaatgattctctctgaccattgtagcggtttgctgcggtaatcatgaggataagagagccacgaaccacggcactgattttcagttctgggaaaatggtgtgcacaggagccaagaggtagccgtaagaaattcattcttctggtctatgggttatgaatgaaaaggtgatatctcattgtttttaggttattaggttagcactttaacatgttattattgctttcttataaaaaccattttaatatgattctattaattatttttatttatttatttattatttgattctattaatgttagatagcagtgatttcattttcttaaaaattagatatgggcaggcgtggtgtctcaccaaggcgggcaaatcacttgaggccaggagttcgagaccagcctgaccaacatggtgaaactccatctctactaaaaatacaaaaattagccaggcgtggtagtggatgtctgtagtcccagctacttgggaggctgaagcacgagaatcgcttaaatccgggaggtggaggttgcagtgagctgagatcatgctactgtactccagcatgggagacagaacaagacactttctccagaaaaaagaaaaaaattaggtaagatgtaatacaacatcagaactattaataaaattccctttatgtgaaaaatgttgtaaataacacaaatacatcttgaaatggaagaaaaaattgatcaagaattaaaacacttctaagctaatggtgtaagggctttgcagaccttattgggcctggcagcgtgacagcatcacatgtgttggctgcagaaacctgccttctcactggaactagctttcattaatagtgtttgagttgtgcagatcttaaggaatgcacccttgttataaaatgtcattgcctatattctccatctgaagtgatcctgtctgaaggttagtactctgcggccctgactgttctaaacagagcttatatacttggtagaagtcaaaaactagggggaaaattagtgacattagcttcataaatgaactgaacaaataaactaaaactttttaaatgaaagagtattaaatgtacttggaggtatcaacacatagaagggggctgtggatatttttgcttattctgaagtttgaaattgtctttcagtgatgggaatgccattggtgtggacattctggctcctgatctccgaggtttttcagaatgcaggacaaggatgtgttcttgcctttcacttccccttggccacaacatgcagtagtaacctctttaattaagagcgtttttgtttgcttgttttcccctgcatggaacatcagaaacttttggtttatcaaggcaagcttttcatgcagcatttagcctttttgtcccagagcatctgaaaactgaatattgtatatgtagttggatgactatttcatcaagacaagaaaccaccaatacatttacctgaaatttaaaagcgtagcatatatatatatgcttgatttttgttcttcctgatcccctgcacctgatagtctctttatggtaatattttcacattcttttttgttgttgttgttgtttttgagatggagtctcgctctgcgcccaggctggagtgcagtggcatgatctcggctcactgcaagctccgcctcctgggttcacgccattctcttgcctcagcctcccgagtagcagagactacaggtgcccaccaccatgcctggctaatttttgtatttttagtagagatggggtttcactgtgttagccaggatggtctcaatctcctgacctcatgatccgcctgcctcagcctcccaaagtgttgggattacaggtgtgagccaccgtgcccgacctgcctgcctgcctttttctcttttattttttctttttttctcttctttctttctttccttttctttttttttttttttttttttttttttggtggagtcacctaggctggagtgcagtggcacaatcttggctcactgcaacctccacctcccaggttcaagtgattctcctgcctcagcctcccaagtagctgggattgcaggtgcctggcaccatgcccagctaatttttgtatttttagtagagatagggtttcaccatgttgaccaagctggtctcgaactcttgacctcaggtgagctatccgccttggcctcccaaagtgcttgggattagaggcgtgagccaccatgcctggcccacattctgcttttcttatgtaagctctgaactgctaagtcgtagtttattcaacaaatgacataggaatgtctattcatgatgagtcttggtataaaagaggatagaattagtgaatacattgttcaataataaatctcatcaacattttctgatcaaaatgaagtttgttagttttcctctcagtagaaatgcatgggctaaaatacagaaatagtgatgactgatgatggtgataattcacatccataaaatctagggctacaataatttggcggattgaaaggtcattttggcaggcctacagttttctgtcaaggatccaggaatactttataaggaattgtgaatgcctgtcagtcttttctcctattgcaagaaggctgaccagtttacactttattagtttactgttttggactttttataagttattagtctaaataagtattttagctggctctgagtatgaataactcacttttttcctttccctagtgaagaacagtccagactggcagcaagaaaatatgctagagttgtacagaagttgggttttccagctaagttcttggacttcaagattcagaatatggtggggagctgtgatgtgaagtttcctataaggttagaaggccttgtgctcacccaccaacaatttagtaggtaagtctgaaatgtattatgattgttattggcaacagttcatttataatctaaacattgttcagaataaaacacatgcaaaatattcagtatatgagaacagttgacatggttatagttgtatgtattcttgcattgtcttcctgatgttctcagtcatatttatcaccctcaccagcctctgcttcccttatcactttgcggtacccataactcccctttactggaatgaatttgattctacttctgtatgttttatcgttttattgctgaatacacttggaatgcatgaattgaccctaaccttgtatcaattttttttcccagtttggatcttctcttttagtcaacattgtgtcagatctaccagcaaagtgtgaagttgagcgataggaacaactttctaattatcttccctgctacttgcaggtgaagactcacaggcaggcagccctgcccacctcactgcttcatctcatggtcttctggtgtctgttcacaggcacattagttctgtgtgcccctggggctcacttggttcctcctgccctaggcctttgcacttgccacttttatgcctagtatgctcatttcccttttcacctaggaagctcccacttgagttccatatgtctacccattccactcttcctcagagaagcctgtcctgaattttgtcttaggtcagacacacagaaacagaggcatcctgttttcagtctctccgaactgagaaaaatgagattactaggcttagaagaatatgtaccaggcctggcctggtggctcacacctgtaatcccagcattttgggaggccgaggcaggcagatcagttgagttcaggagttcaagaccagcctggccaacatggtgaaacctcgtctttactaaaaatacaaaaattagctggacatggtggtgcatgcctgtaatcccagttacatgggaggctgaggcaggacaatcattcgaacccaggagatggaggttgcagtgagccaagatcgtgccactgtactccagcctgggcgacacagcaagactccgtctcaaaaaaaaaaagaatatataccaatagtccattcagtcagacagcttaatcaggtataggttaattctcaggctagtatataagtttgattaaatttcctgaccacaattgtcagctagagaatatttcaatttaaggaggtaagatatgattaaaagttaaactgtcagtattggatcttagaagtaaatgattattaggactgtaatagtaattattaggactgtaaaagtaaaggattattatctgcattagatatcattatatctaatgatatagagactgcagacataactacagggctctttttcttaaatcagaaaatccagattcaatagaaatagggtaaagtgataggaggacaaatagccttccatccagtggttatcaactgacgactacaagtcggcctcacttgctttaattattctattctatcctttgatgctgcttgaagaactgtgttttacctcttgactagtttgtttattcagtatttttccttgtacaggtcctcattttatctaaaagcacacaaagctcttgatttctaaactttttgcaattttccttctagttatgagccagagttatttcctggtttaatctacagaatgatcaaacccagaattgttctccttatttttgtttctggaaaagttgtattaacaggtaagttgtaacaggaagtagtatctgaaagtttgtaagtgttttgagtatggcattttctcagtgctgaaaagaaatttcagtgttcggacagtgggctagcttcttgtacaaaggcctcccacccaaagtctgatgagaaacgtgcccactaaaggcacagtgagagcagggaagtctgaccacagctctgcaagcagacttccatttacagtgaggaggtgagcattgcattgaacaaaagatggcgttttcacttggaattagttatctgaagctttaggattcctcagcaatatgattatgagacaagaaaggaagattcagaaatgagtctagttgaaggcagcaattcagagaagaagattcagttgttatcattgccgtcctgcttggtttatggcctggttcaggaccaaggagagaagtgtgaatacatgcctcttgagctatagaatgagacgctggagtcactaagatgattttttaaaagtattgttttataaacaaaaataagattgtgacaagggattccactattaatgttttcatgcctgtgccttaatctgactgggtatggtgagaattgtgcttgcagctttaaggtaagaattttaccatcttaatatgttaagaagtgccatttcagtctctcatctctactccaacttgtcttcttaggtgctaaagtcagagcagaaatttatgaagcatttgaaaacatctaccctattctaaagggattcaggaagacgacgtaatggctctcatgtacccttgcctcccccacccccttctttttttttttttaaacaaatcagtttgttttggtacctttaaatggtggtgttgtgagaagatggatgttgagttgcagggtgtggcaccaggtgatgcccttctgtaagtgcccaccgcgggatgccgggaaggggcattatttgtgcactgagaacaccgcgcagcgtgactgtgagttgctcataccgtgctgctatctgggcagcgctgcccatttatttatatgtagattttaaacactgctgttgacaagttggtttgagggagaaaactttaagtgttaaagccacctctataattgattggactttttaattttaatgtttttccccatgaaccacagtttttatatttctaccagaaaagtaaaaatcttttttaaaagtgttgtttttctaatttataactcctaggggttatttctgtgccagacacattccacctctccagtattgcaggacagaatatatgtgttaatgaaaatgaatggctgtacatatttttttctttcttcagagtactctgtacaataaatgcagtttataaaagtgttagattgttgtta

SEQ ID NO: 119 - DNA, 1719 bp, Homo sapiens
ggcggaagtgacattatcaacgcgcgccaggggttcagtgaggtcgggcaggttcgctgtggcgggcgcctgggccgccggctgtttaacttcgcttccgctggcccatagtgatctttgcagtgacccagggtgccatgactcccggaatccctatctttagtccaatgatgccttatggcactggactgaccccacagcctattcagaacaccaatagtctgtctattttggaagagcaacaaaggcagcagcagcaacaacaacagcagcagcagcagcagcagcagcaacagcaacagcagcagcagcagcagcagcagcagcagcagcagcagcagcagcagcagcagcagcaacaggcagtggcagctgcagccgttcagcagtcaacgtcccagcaggcaacacagggaacctcaggccaggcaccacagctcttccactcacagactctcacaactgcacccttgccgggcaccactccactgtatccctcccccatgactcccatgacccccatcactcctgccacgccagcttcggagagttctgggattgtaccgcagctgcaaaatattgtatccacagtgaatcttggttgtaaacttgacctaaagaccattgcacttcgtgcccgaaacgccgaatataatcccaagcggtttgctgcggtaatcatgaggataagagagccacgaaccacggcactgattttcagttctgggaaaatggtgtgcacaggagccaagagtgaagaacagtccagactggcagcaagaaaatatgctagagttgtacagaagttgggttttccagctaagttcttggacttcaagattcagaatatggtggggagctgtgatgtgaagtttcctataaggttagaaggccttgtgctcacccaccaacaatttagtagttatgagccagagttatttcctggtttaatctacagaatgatcaaacccagaattgttctccttatttttgtttctggaaaagttgtattaacaggtgctaaagtcagagcagaaatttatgaagcatttgaaaacatctaccctattctaaagggattcaggaagacgacgtaatggctctcatgtacccttgcctcccccacccccttctttttttttttttaaacaaatcagtttgttttggtacctttaaatggtggtgttgtgagaagatggatgttgagttgcagggtgtggcaccaggtgatgcccttctgtaagtgcccaccgcgggatgccgggaaggggcattatttgtgcactgagaacaccgcgcagcgtgactgtgagttgctcataccgtgctgctatctgggcagcgctgcccatttatttatatgtagattttaaacactgctgttgacaagttggtttgagggagaaaactttaagtgttaaagccacctctataattgattggactttttaattttaatgtttttccccatgaaccacagtttttatatttctaccagaaaagtaaaaatcttttttaaaagtgttgtttttctaatttataactcctaggggttatttctgtgccagacacattccacctctccagtattgcaggacagaatatatgtgttaatgaaaatgaatggctgtacatatttttttctttcttcagagtactctgtacaataaatgcagtttataaaagtgttagattgttgttaaaaaaaaaaaaaaaaaa

SEQ ID NO: 120 - DNA, 1719 bp, Homo sapiens; identical to SEQ ID NO: 119

SEQ ID NO: 121 - DNA, 4909 bp, Homo sapiens
tagacgcaccctctgaagatggtgactccctcctgagaagctggaccccttggtaaaagacaaggccttctccaagaagaatatgaaagtgttactcagacttatttgtttcatagctctactgatttcttctctggaggctgataaatgcaaggaacgtgaagaaaaaataattttagtgtcatctgcaaatgaaattgatgttcgtccctgtcctcttaacccaaatgaacacaaaggcactataacttggtataaagatgacagcaagacacctgtatctacagaacaagcctccaggattcatcaacacaaagagaaactttggtttgttcctgctaaggtggaggattcaggacattactattgcgtggtaagaaattcatcttactgcctcagaattaaaataagtgcaaaatttgtggagaatgagcctaacttatgttataatgcacaagccatatttaagcagaaactacccgttgcaggagacggaggacttgtgtgcccttatatggagttttttaaaaatgaaaataatgagttacctaaattacagtggtataaggattgcaaacctctacttcttgacaatatacactttagtggagtcaaagataggctcatcgtgatgaatgtggctgaaaagcatagagggaactatacttgtcatgcatcctacacatacttgggcaagcaatatcctattacccgggtaatagaatttattactctagaggaaaacaaacccacaaggcctgtgattgtgagcccagctaatgagacaatggaagtagacttgggatcccagatacaattgatctgtaatgtcaccggccagttgagtgacattgcttactggaagtggaatgggtcagtaattgatgaagatgacccagtgctaggggaagactattacagtgtggaaaatcctgcaaacaaaagaaggagtaccctcatcacagtgcttaatatatcggaaattgaaagtagattttataaacatccatttacctgttttgccaagaatacacatggtatagatgcagcatatatccagttaatatatccagtcactaatttccagaagcacatgattggtatatgtgtcacgttgacagtcataattgtgtgttctgttttcatctataaaatcttcaagattgacattgtgctttggtacagggattcctgctatgattttctcccaataaaagcttcagatggaaagacctatgacgcatatatactgtatccaaagactgttggggaagggtctacctctgactgtgatatttttgtgtttaaagtcttgcctgaggtcttggaaaaacagtgtggatataagctgttcatttatggaagggatgactacgttggggaagacattgttgaggtcattaatgaaaacgtaaagaaaagcagaagactgattatcattttagtcagagaaacatcaggcttcagctggctgggtggttcatctgaagagcaaatagccatgtataatgctcttgttcaggatggaattaaagttgtcctgcttgagctggagaaaatccaagactatgagaaaatgccagaatcgattaaattcattaagcagaaacatggggctatccgctggtcaggggactttacacagggaccacagtctgcaaagacaaggttctggaagaatgtcaggtaccacatgccagtccagcgacggtcaccttcatctaaacaccagttactgtcaccagccactaaggagaaactgcaaagagaggctcacgtgcctctcgggtagcatggagaagttgccaagagttctttaggtgcctcctgtcttatggcgttgcaggccaggttatgcctcatgctgacttgcagagttcatggaatgtaactatatcatcctttatccctgaggtcacctggaatcagattattaagggaataagccatgacgtcaatagcagcccagggcacttcagagtagagggcttgggaagatcttttaaaaaggcagtaggcccggtgtggtggctcacgcctataatcccagcactttgggaggctgaagtgggtggatcaccagaggtcaggagttcgagaccagcccagccaacatggcaaaaccccatctctactaaaaatacaaaaatgagctaggcatggtggcacacgcctgtaatcccagctacacctgaggctgaggcaggagaattgcttgaaccggggagacggaggttgcagtgagccgagtttgggccactgcactctagcctggcaacagagcaagactccgtctcaaaaaaagggcaataaatgccctctctgaatgtttgaactgccaagaaaaggcatggagacagcgaactagaagaaagggcaagaaggaaatagccaccgtctacagatggcttagttaagtcatccacagcccaagggcggggctatgccttgtctggggaccctgtagagtcactgaccctggagcggctctcctgagaggtgctgcaggcaaagtgagactgacacctcactgaggaagggagacatattcttggagaactttccatctgcttgtattttccatacacatccccagccagaagttagtgtccgaagaccgaattttattttacagagcttgaaaactcacttcaatgaacaaagggattctccaggattccaaagttttgaagtcatcttagctttccacaggagggagagaacttaaaaaagcaacagtagcagggaattgatccacttcttaatgctttcctccctggcatgaccatcctgtcctttgttattatcctgcattttacgtctttggaggaacagctccctagtggcttcctccgtctgcaatgtcccttgcacagcccacacatgaaccatccttcccatgatgccgctcttctgtcatcccgctcctgctgaaacacctcccaggggctccacctgttcaggagctgaagcccatgctttcccaccagcatgtcactcccagaccacctccctgccctgtcctccagcttcccctcgctgtcctgctgtgtgaattcccaggttggcctggtggccatgtcgcctgcccccagcactcctctgtctctgctcttgcctcgacccttcctcctcctttgcctaggaggccttctcgcattttctctagctgatcagaattttaccaaaattcagaacatcctccaattccacagtctctgggagactttccctaagaggcgacttcctctccagccttctctctctggtcaggcccactgcagagatggtggtgagcacatctgggaggctggtctccctccagctggaattgctgctctctgagggagaggctgtggtggctgtctctgtccctcactgccttccaggagcaatttgcacatgtaacatagatttatgtaatgctttatgtttaaaaacattccccaattatcttatttaatttttgcaattattctaattttatatatagagaaagtgacctattttttaaaaaaatcacactctaagttctattgaacctaggacttgagcctccatttctggcttctagtctggtgttctgagtacttgatttcaggtcaataacggtcccccctcactccacactggcacgtttgtgagaagaaatgacattttgctaggaagtgaccgagtctaggaatgcttttattcaagacaccaaattccaaacttctaaatgttggaattttcaaaaattgtgtttagattttatgaaaaactcttctactttcatctattctttccctagaggcaaacatttcttaaaatgtttcattttcattaaaaatgaaagccaaatttatatgccaccgattgcaggacacaagcacagttttaagagttgtatgaacatggagaggacttttggtttttatatttctcgtatttaatatgggtgaacaccaacttttatttggaataataattttcctcctaaacaaaaacacattgagtttaagtctctgactcttgcctttccacctgctttctcctgggcccgctttgcctgcttgaaggaacagtgctgttctggagctgctgttccaacagacagggcctagctttcatttgacacacagactacagccagaagcccatggagcagggatgtcacgtcttgaaaagcctattagatgttttacaaatttaattttgcagattattttagtctgtcatccagaaaatgtgtcagcatgcatagtgctaagaaagcaagccaatttggaaacttaggttagtgacaaaattggccagagagtgggggtgatgatgaccaagaattacaagtagaatggcagctggaatttaaggagggacaagaatcaatggataagcgtgggtggaggaagatccaaacagaaaagtgcaaagttattccccatcttccaagggttgaattctggaggaagaagacacattcctagttccccgtgaacttcctttgacttattgtccccactaaaacaaaacaaaaaacttttaatgccttccacattaattagattttcttgcagtttttttatggcatttttttaaagatgccctaagtgttgaagaagagtttgcaaatgcaacaaaatatttaattaccggttgttaaaactggtttagcacaatttatattttccctctcttgcctttcttatttgcaataaaaggtattgagccattttttaaatgacatttttgataaattatgtttgtactagttgatgaaggagttttttttaacctgtttatataattttgcagcagaagccaaattttttgtatattaaagcaccaaattcatgtacagcatgcatcacggatcaatagactgtacttattttccaataaaattttcaaactttgtactgttaaa
